(19) United States
(12) Patent Application Publication
(10) Pub. No.: US 2024/0299579 A1
(43) Pub. Date: Sep. 12, 2024

(54) GENE EDITING TO IMPROVE JOINT FUNCTION

(71) Applicant: Orthobio Therapeutics, Inc., Vail, CO (US)

(72) Inventor: Peter J. Millett, Edwards, CO (US)

(73) Assignee: Orthobio Therapeutics, Inc., Vail, CO (US)

(21) Appl. No.: 18/006,455

(22) PCT Filed: Jul. 23, 2021
(86) PCT No.: PCT/US2021/043081

§ 371 Date: Jan. 23, 2023

Related U.S. Application Data
(60) Provisional application No. 63/055,836, filed on Jul. 23, 2020.

(51) Int. Cl. A61K 48/00; A61P 19/02; C12N 9/22; C12N 15/11

(52) U.S. Cl. CPC A61K 48/0016; A61K 48/0075; A61P 19/02; C12N 9/22; C12N 15/111; C12N 2310/20

(57) ABSTRACT

The present disclosure provides compositions and methods for treating joint disorders that are characterized by an inflammatory component. In some aspects, the compositions and methods are to prevent the progression of osteoarthritis and other arthritides and to treat osteoarthritis and other arthritides in a mammalian joint.

### CROSS REFERENCE TO RELATED APPLICATIONS

[0001] This application is a U.S. National Phase of International Application No. PCT/US2021/043081 filed Jul. 23, 2021, and claims priority to U.S. Provisional Patent Application No. 63/055,836, filed Jul. 23, 2020 the contents of which are hereby incorporated by reference, in their entireties, for all purposes.

### FIELD

[0002] Compositions and methods for treating synovial joint dysfunction are described herein. In addition, methods for gene-editing synovial cells and/or synoviocytes, chondrocytes, synovial macrophages, and synovial fibroblasts, and uses of gene-edited synovial cells and/or synoviocytes, chondrocytes, synovial macrophages, and synovial fibroblasts, in the treatment of diseases such as osteoarthritis are disclosed herein.

### BACKGROUND

[0003] Treatment of osteoarthritis, degenerative joint disease, and other joint dysfunction is complex and there are few long term options for either symptomatic relief or restoring joint function. Osteoarthritis (OA) is the leading cause of disability due to pain. Neogi, Osteoarthritis Cartilage 2013; 21:1145-53. All mammal species are affected: working animals, domestic pets, and their owners all suffer OA-related discomfort, pain, and disability, depending on the degree of disease progression.

[0004] OA is a complex disease characterized by a progressive course of disability. Systemic inflammation is associated with OA and with OA disease progression. Inflammation is driven by increased levels of pro-inflammatory cytokines. New methods and compositions to treat this disease are acutely needed. Disclosed herein are compositions and methods useful for treating OA as well as other inflammatory joint disorders.

### BRIEF SUMMARY

[0005] The present disclosure provides compositions and methods for treating joint disorders that are characterized by an inflammatory component. In some aspects, the compositions and methods are to prevent the progression of osteoarthritis and other arthritides and to treat osteoarthritis and other arthritides in a mammalian joint. According to exemplary embodiments, at least a portion of the joint synovial cells and/or synoviocytes, chondrocytes, synovial macrophages, or synovial fibroblasts are gene-edited to reduce the expression of inflammatory cytokines. In some aspects, at least a portion of the joint synovial cells and/or synoviocytes, chondrocytes, synovial macrophages, or synovial fibroblasts, are gene-edited to alter (e.g., increase or reduce) the expression of (i) one or more genes selected from Table 1 and/or genes described in FIG. 20, and/or (ii) one or more proteins encoded by genes selected from Table 1 and/or genes described in FIG. 20. In some aspects, at least a portion of the joint synovial cells and/or synoviocytes, chondrocytes, synovial macrophages, or synovial fibroblasts, are gene-edited to alter (e.g., increase or reduce) the expression of superoxide dismutase. In some aspects, at least a portion of the joint synovial cells and/or synoviocytes, chondrocytes, synovial macrophages, or synovial fibroblasts, are gene-edited to alter (e.g., increase or reduce) the expression of catalase. In some aspects, at least a portion of the joint synovial cells and/or synoviocytes, chondrocytes, synovial macrophages, or synovial fibroblasts, are gene-edited to alter (e.g., increase or reduce) the expression of glutathione peroxidase, and/or reduce the expression of IL-1α, IL-1β, or both IL-1α, IL-1β.

[0006] In some embodiments, the gene-editing causes expression of one or more cytokine and/or growth factor genes to be silenced or reduced in at least a portion of the cells comprising a mammalian joint. In some aspects, the cells are synovial cells. In some aspects, the cells are synovial fibroblasts. In some aspects, the cells are synoviocytes. In some aspects, the cells are chondrocytes. In some aspects, the cells are synovial macrophages.

[0007] In some embodiments, the one or more cytokine and/or growth factor genes is/are selected from Table 1 and/or genes described in FIG. 20. In some embodiments, the one or more genes is superoxide dismutase. In some embodiments, the one or more genes is catalase. In some embodiments, the one or more genes is glutathione peroxidase and/or selected from the group comprising IL-1α, and IL-1β.

[0008] In some embodiments, the gene-editing comprises the use of a programmable nuclease that mediates the generation of a double-strand or single-strand break at said one or more genes, including without limitation cytokine and/or growth factor genes.

[0009] In some embodiments, the gene-editing comprises one or more methods selected from a CRISPR method, a TALE method, a zinc finger method, and a combination thereof. In some embodiments, the gene-editing comprises a CRISPR method.

[0010] In some embodiments, the CRISPR method is a CRISPR-Cas9 method.

[0011] In some embodiments, the gene-editing comprises a TALE method.

[0012] In some embodiments, the gene-editing comprises a zinc finger method.

[0013] In some embodiments, the gene-editing causes expression of one or more cytokine and/or growth factor genes to be silenced or reduced in at least a portion of the cells comprising the joint. In some embodiments, the portion of cells edited are synoviocytes. In an aspect, the portion of cells edited are synovial fibroblasts. In some embodiments, the portion of cells edited are synoviocytes. In some embodiments, the portion of cells edited are chondrocytes. In some embodiments, the portion of cells edited are synovial macrophages.

[0014] In some embodiments, an adeno-associated virus (AAV) delivery system is used to deliver the gene-editing system. In some embodiments, the AAV delivery system is injected into a joint.

[0015] Some aspects of the present disclosure provide a pharmaceutical composition for the treatment or prevention of a joint disease or condition comprising a gene-editing system and a pharmaceutically acceptable carrier. In an aspect, the gene-editing system comprises one or more nucleic acids targeting one or more genetic locus selected from Table 1 and/or genes described in FIG. 20.

[0016] An embodiment provides a method of treating canine lameness, the method comprising administering a gene-editing composition, wherein the composition causes expression of one or more genes or proteins from Table 1 and/or genes described in FIG. 20 to be silenced or reduced in a portion of a lame joint's synoviocytes, chondrocytes, synovial macrophages, or synovial fibroblasts.

[0017] In some embodiments, the above method further comprises one or more features recited in any of the methods and compositions described herein.

### DESCRIPTION OF THE DRAWINGS

[0018] The presently disclosed embodiments will be further explained with reference to the attached drawings. The drawings shown are not necessarily to scale, with emphasis instead generally being placed upon illustrating the principles of the presently disclosed embodiments.

[0019] FIG. 1A illustrates an agarose gel electrophoresis analysis of 100 ng mouse DNA (gBlocks, Integrated DNA Technologies) designed against the Mus musculus Il1a and Il1b genes, cleaved by 0.5 μg SpyCas9 (TrueCut™ Cas9 protein v2, ThermoFisher Scientific) and 200 ng Phosphorothioate-modified single guide (sg)RNAs targeted against the Il1a gene (#43-46) and Il1b gene (#47-50) in vitro.

[0020] FIG. 1B illustrates an agarose gel electrophoresis analysis of 100 ng mouse DNA (gBlocks, Integrated DNA Technologies) designed against the Mus musculus Il1a and Il1b genes, cleaved by 0.5 μg SauCas9 (GeneSnipper™ Cas9, BioVision) and 200 ng Phosphorothioate-modified guide sgRNAs against the Il1a (#51-53) and Il1b (#54-56) genes.

[0021] FIGS. 2A, 2B, 2C, and 2D collectively illustrate graphs displaying editing efficiencies of SpyCas9 and SauCas9 used with a range of guide RNA's in J774.2 (“J”) and NIH3T3 (“N”) cells; FIG. 2A: in vivo cleavage of Il1a, edited with 4× sgRNAs (Spy Cas9) in two separate pools (Pool 1 and 2), across two cell lines, NIH 3T3 (“N”), and J774.2 (“J”); FIG. 2B: in vivo cleavage of Il1b, edited with 4× sgRNAs (Spy Cas9) in two separate pools (Pool 1 and 2), across two cell lines, NIH 3T3 (“N”), and J774.2 (“J”); FIG. 2C: in vivo cleavage of Il1a, edited with 3× sgRNAs (Sau Cas9) in two separate pools (Pool 1 and 2), across two cell lines, NIH 3T3 (“N”), and J774.2 (“J”); FIG. 2D: in vivo cleavage of Il1b, edited with 3× sgRNAs (saCas9) in two separate pools (Pool 1 and 2), across two cell lines, NIH 3T3 (“N”), and J774.2 (“J”); editing efficiencies determined using deconvolution of Sanger sequencing traces (ICE tool, Synthego) of each pool.

[0022] FIG. 3 illustrates GFP expression measured using the IVIS system. Flux values were based on a region of interest centred on the animal's injected knee joint. Data are presented as mean (SD) for four specimens per group.

[0023] FIG. 4 illustrates the design of a study as described in Example 5 of the present disclosure.

[0024] FIG. 5 illustrates the in-life outcome measurements obtained in a study as described in Example 5 of the present disclosure.

[0025] FIG. 6 illustrates the change in body weight of mice treated with an intra-articular (IA) injection of PBS, AAV-6 with a scrambled vector, AAV-6 with CRISPR-Cas guides 1 and 2, AAV-5 with a scrambled vector, or AAV-5 with CRISPR-Cas guides 1 and 2 in a study as described in Example 5 of the present disclosure.

[0026] FIGS. 7A and 7B collectively illustrate (A) change in knee caliper measurements from baseline of mouse joints over time, and (B) mean difference in ankle caliper measurements with AUC in mice treated with an intra-articular (IA) injection of PBS, AAV-6 with a scrambled vector, AAV-6 with CRISPR-Cas guides 1 and 2, AAV-5 with a scrambled vector, or AAV-5 with CRISPR-Cas guides 1 and 2 in a study as described in Example 5 of the present disclosure.

[0027] FIGS. 8A and 8B collectively illustrate (A) change in von Frey measurements, and (B) mean absolute threshold in von Frey measurements obtained from mice treated with an intra-articular (IA) injection of PBS, AAV-6 with a scrambled vector, AAV-6 with CRISPR-Cas guides 1 and 2, AAV-5 with a scrambled vector, or AAV-5 with CRISPR-Cas guides 1 and 2 in a study as described in Example 5 of the present disclosure.

[0028] FIG. 9 illustrate results of a qPCR assay for IL-1β expression in synovial fluid obtained from mice treated with an intra-articular (IA) injection of PBS, AAV-6 with a scrambled vector, AAV-6 with CRISPR-Cas guides 1 and 2, AAV-5 with a scrambled vector, or AAV-5 with CRISPR-Cas guides 1 and 2 in a study as described in Example 5 of the present disclosure.

[0029] FIGS. 10A, 10B, 10C, and 10D collectively illustrate immunohistochemistry for murine IL-1β in synovial tissue of MSU injected animals (A, B) pre-treated with PBS, and (C, D) treated with CRISPR. FIGS. 10B and 10D show isotype controls for each of FIGS. 10A and 10C, respectively.

[0030] FIGS. 11A, 11B, and 11C collectively illustrate an alignment between the mouse, human, equine, feline, and canine IL-1 alpha genes.

[0031] FIGS. 12A, 12B, 12C, and 12D collectively illustrate an alignment between the mouse, human, equine, feline, and canine IL-1 beta genes.

[0032] FIGS. 13A, 13B, 13C, and 13D collectively illustrate example CRISPR/Cas9 crRNA sequences designed for editing the human IL-1 alpha gene.

[0033] FIGS. 14A, 14B, 14C, 14D, and 14E collectively illustrate example CRISPR/Cas9 crRNA sequences designed for editing the human IL-1 beta gene.

[0034] FIGS. 15A, 15B, and 15C collectively illustrate example CRISPR/Cas9 crRNA sequences designed for editing the canine IL-1 alpha gene.

[0035] FIGS. 16A and 16B collectively illustrate example CRISPR/Cas9 crRNA sequences designed for editing the canine IL-1 beta gene.

[0036] FIGS. 17A, 17B, 17C, and 17D collectively illustrate the results of cell-based and in-silico gene editing analysis of crRNA sequences targeting the human IL-1 alpha gene (FIG. 7A), human IL-1 beta gene (FIG. 7B), canine IL-1 alpha gene (FIG. 7C), and canine IL-1 beta gene (FIG. 7D), as described in Example 8. ° CRISPR cut position within the translation frame of amino acids (AA). *Optimized score from Doench, Fusi et al. (2016). This score is optimized for 20 bp guides with NGG. Score spans from 0 to 100. Higher is better. **Specificity score from Hsu et al. (2013). Score spans from 0 to 100. Higher is better. ***This score is based on experiments in U2OS. A high precision score (>0.4) implies that DNA repair outcomes are uniform and enriched for just a handful of unique genotypes. ****This score is based on experiments in U2OS. A high (>80%) frameshift frequency will tend to knock a protein-coding gene out of frame. The typical genomic frameshift frequency is above 66% because 1-bp insertions and 1-2 bp deletions are particularly common repair outcomes. \hat{ } Combined score=(Off-target score+Precision score*100+Frameshift)/3. † Pipe symbol ‘|’ indicates CRISPR cut site. Curly braces ‘{ }’ indicate insertion. Hyphen ‘-’ indicates deletion. $ Potential off-target sites. Scoring according to Hsu et al. (2013). The on-target site has a score of 100.

[0037] FIGS. 18A, 18B, 18C, and 18D collectively illustrate canine IL-1 alpha (FIGS. 18A and 18B) and canine IL-1 beta (FIGS. 18C and 18D) release from non-edited (control) and double IL-1α/IL-1β KO (edited) canine chondrocytes 6 hours (FIGS. 18A and 18C) and 24 hours (FIGS. 18B and 18D) after exposure to PBS or LPS, as described in Example 9.

[0038] FIGS. 19A, 19B, 19C, and 19D collectively illustrate human IL-1 alpha (FIGS. 19A and 19B) and canine IL-1 beta (FIGS. 19C and 19D) release from non-edited (control) and double IL-1α/IL-1β KO (edited) canine chondrocytes 6 hours (FIGS. 19A and 19C) and 24 hours (FIGS. 19B and 19D) after exposure to PBS or LPS, as described in Example 9.

[0039] FIGS. 20A, 20B, 20C, 20D, 20E, 20F, 20G, 20H, 20I, 20J, 20K, 20L, 20M, 20N, 200, 20P, 20Q, 20R, 20S, 20T, 20U, 20V, 20W, 20X, 20Y, 20Z, 20A1, 20B1, 20C1, 20D1, 20E1, 20F1, 20G1, 20H1, 2011, 20J1, 20K1, 20L1, 20M1, 20N1, 2001, 20P1, 20Q1, 20R1, 20S1, 20T1, 20U1, 20V1, 20W1, 20X1, 20Y1, 20Z1, 20A2, 20B2, 20C2, 20D2, 20E2, 20F2, 20G2, 20H2, 2012, 20J2, 20K2, 20L2, 20M2, 20N2, 2002, 20P2, 20Q2, 20R2, 20S2, 20T2, 20U2, 20V2, 20W2, 20X2, 20Y2, 20Z2, 20A3, 20B3, 20C3, 20D3, 20E3, 20F3, 20G3, 20H3, 2013, 20J3, 20K3, and 20L3 collectively illustrate example CRISPR/Cas9 crRNA sequences designed for editing genes associated with the production, blocking, or removal of reactive oxygen species (ROS), in accordance with some embodiments of the present disclosure. The crRNA sequences were generated using the CRISPick server available online at the URL portals.broadinstitute.org/gppx/crispick/public. The algorithm was run against build GRCh38 (NCBI RefSeq v.109.20210514) of the human genome, and the algorithm optimized for a CRISPR knock-out (CRISPRko) mechanism and SpyoCas9 enzyme. The example sequences listed in FIG. 20 are not intended to be limiting.

[0040] FIGS. 21A, 21B, and 21C collectively illustrate example CRISPR/Cas9 crRNA sequences designed for editing genes associated with the production, blocking, or removal of reactive oxygen species (ROS), in accordance with some embodiments of the present disclosure, e.g., NOX4. The crRNA sequences were generated using the CRISPick server available online at the URL portals.broadinstitute.org/gppx/crispick/public. The algorithm was run against build GRCh38 (NCBI RefSeq v.109.20210514) of the human genome, and the algorithm optimized for a CRISPR knock-out (CRISPRko) mechanism (FIG. 21A), a CRISPRRa mechanism (FIG. 21B), and a CRISPRi mechanism (FIG. 21C), and SpyoCas9 enzyme. The example sequences listed in FIG. 21 are not intended to be limiting.

[0041] FIGS. 22A, 22B, 22C, and 22D collectively illustrate example CRISPR/Cas9 crRNA sequences designed for editing genes associated with the production, blocking, or removal of reactive oxygen species (ROS), in accordance with some embodiments of the present disclosure. e.g., NOX4. The crRNA sequences were generated using the CRISPick server available online at the URL portals.broadinstitute.org/gppx/crispick/public. The algorithm was run against build GRCh38 (NCBI RefSeq v.109.20210514) of the human genome, and the algorithm optimized for a CRISPR knock-out (CRISPRko) mechanism, and SpyoCas9 enzyme (FIG. 22A), SaurCas9 enzyme (FIG. 22B), AsCas12 enzyme (FIG. 22C), and enAsCas12a enzyme (FIG. 22D). The example sequences listed in FIG. 22 are not intended to be limiting.

[0042] While the above-identified drawing sets forth presently disclosed embodiments, other embodiments are also contemplated, as noted in the discussion. This disclosure presents illustrative embodiments by way of representation and not limitation. Numerous other modifications and embodiments can be devised by those skilled in the art which fall within the scope and spirit of the principles of the presently disclosed embodiments.

### DETAILED DESCRIPTION

[0043] As described herein, embodiments of the present disclosure provide compositions and methods for improving joint function and treating joint disease. In particular embodiments, compositions and methods are provided to gene-edit synovial fibroblasts, synoviocytes, chondrocytes, or synovial macrophages to reduce expression of inflammatory cytokines, for example, IL-1α, IL-1β, TNF-α, IL-6, IL-8, IL-18, and/or one or more genes or proteins selected from Table 1 and/or genes described in FIG. 20.

[0044] In certain embodiments, methods of the present disclosure can be used to edit matrix metalloproteinases (MMPs), or one or more genes associated with the onset, reduction or prevention of inflammation (e.g., joint inflammation). In certain embodiments, a gene associated with the onset, reduction or prevention of inflammation can be edited (e.g., to repair a defect and/or enhance a function of a protein associated with the gene). For example, variations in human leukocyte antigen (HLA) genes (e.g., HLA-DRB1) can be a significant genetic risk factor for arthritis and/or joint inflammation. A person having skill in the art will appreciate that editing this gene (e.g., to repair a gene mutation) using the invention of the present disclosure can reduce or prevent inflammation associated with these genes. Non-limiting examples of genes that can be edited (and their associated proteins) are provided in Table 1 and/or genes described in FIG. 20. Additional genes and proteins associated with ROS Production, Blocking, and/or Removal can be found, for example, in Zhao, et al., “Molecular and Genetic Inflammation Networks in Major Human Diseases,” Mol Biosyst. 2016 Jul. 19; 12(8): 2318-2341, which is incorporated by reference herein for all purposes.

TABLE 1
Genes/Proteins Associated with Inflammation

6-phosphogluconate dehydrogenase (6PGD)
Alcohol dehydrogenase (ADH)
Aldehyde dehydrogenase (ALDH2)
AP-1
B-cell lymphoma-extra large (Bcl-XL)
BCL2 apoptosis regulator (Bcl-2)
Bcl-2-associated X protein (BAX)
Catalase (CAT)
C-Jun N-terminal kinase (JNK)
Coenzyme Q10
CYP2E1
Cytochrome c (Cyt c)
F1Fo-ATP synthase
Ferritin heavy chain (FHC)
Glucose-6-phosphate dehydrogenase (G6PD)
Glutamylcysteine synthetase (GCS)
Glutathione (GSH) synthase
Glutathione Peroxidase 1 (GPX1)
Glutathione Peroxidase 2 (GPX2)
Glutathione Peroxidase 3 (GPX3)
Glutathione Peroxidase 4 (GPX4)
Glutathione Peroxidase 5 (GPX5)
Glutathione Peroxidase 6 (GPX6)
Glutathione Peroxidase 7 (GPX7)
Glutathione Peroxidase 8 (GPX8)
Glutathione reductase (GR)
Glycerol 3-phosphate dehydrogenase
Growth arrest and DNA damage (GADD 45)
Hypoxia-inducible factor 1-alpha (HIF-1α)
Mitogen-activated protein kinase (MAPK)
NADH-ubiquinone oxidoreductase
NADPH oxidase 4 (NOX4)
NADPH oxidase 5 (NOX5)
Nuclear factor kappa-light-chain-enhancer of activated B cells (NF-κB)
Nuclear factor κB (NF-κB) essential modulator (NEMO)
p46Shc (SHC isoform)
p52Shc (SHC isoform)
p53 upregulated modulator of apoptosis (PUMA)
p66Shc (SHC isoform)
Phosphoinositide 3-kinase (PI3-K)
Proline oxidase (PIG6, POX)
Quinone oxidoreductase (PIG3, NQO1)
Respiratory complexes I
Respiratory complexes II
Respiratory complexes III
Respiratory complexes IV
Sestrin 1 (SESN1)
Sestrin 2 (SESN2)
SHC adaptor protein 1 (SHC1)
Superoxide dismutase 1 (SOD1)
Superoxide dismutase 2 (SOD2)
Superoxide dismutase 3 (SOD3)
TNF alpha induced protein 3 (TNFAIP3)
Tumor protein 53 (p53)
Tumor protein p53 inducible nuclear protein 1 (TP53INP1)
Ubiquinol-cytochrome c oxidoreductase
2B4
ABCA1
ACP5
ADAR-1
ADSS
AIG1
AIM2
APOBEC3
ARRB2
B2M
BCAS3
BMP4
C10orf32
C21orf33
CASP1
CCL5
CD160
Cd53
CDKN2A
CHEK1
CNNM2
CNTNAP2
CSMD1
CTLA-4
CTSB
C-type lectin receptors CLRs
CXCL10
CYP17A1
DDX60
DYNC1I1
FOXO3a
GPC6
GRN
HCK
HECW1
HLA
IFI30
IFI44L
IFI6
IFITM
IFITM1/3
IFITM2
IFITM3
IL-18
IL-1α
IL-1β
interferon-γ
interleukin-12 (IL-12)
IRF
IRF-1
IRF3
IRF7
LAG-3
LIPC
MDA5/IFIH1
MPAK
MYH9
MYO16
MYO5A
NAIP
NF-κB
NLRC4
NLRP3
NOD2
NPL
NR
nucleotide oligomerization and binding domain NOD-like receptors
OAS1
OAS2
OASL
parkin gene (PARK2)
PD-1
PLEKHG1
PRKCA
PTBP1
PYCARD
Pyrin-HIN (PYHIN) domain containing receptors (e.g. AIM2)
reactive oxygen species (ROS)
retinoic acid inducible gene-I (RIG-I)-like receptors (RLRs)_{—}
RFC3
RGS1
RIG-I/DDX58
SAMHD1
SF3A1/SF3B1
SFXN2
SLAMF7
SLC41A1
SLC8A1
SLCO3A1
STAT1
Tetherin
TLR5
TLR7
TLR9
Toll-like receptors (TLRs)
TREM2
TREX1
TRIM5
TTLL7
TYROBP

[0045] Non-limiting examples of genes that may be silenced or inhibited by permanently gene-editing synoviocytes via a zinc finger method include IL-1α, IL-1β, IL-4, IL-9, IL-10, IL-13, TNF-α. IL-6, IL-8, IL-18, a matrix metalloproteinase (MMP), or a component of the NLRP3 inflammasome. Embodiments are used for treating osteoarthritis and other inflammatory joint diseases. Embodiments are further useful for treating canine lameness due to osteoarthritis. Embodiments are further useful for treating equine lameness due to joint disease. Embodiments are also useful for treating post-traumatic arthritis, gout, pseudogout, and other inflammation-mediated or immune-mediated joint diseases.

### Definitions

[0046] Unless defined otherwise, all technical and scientific terms used herein have the same meaning as is commonly understood by one of skill in the art to which this disclosure belongs. All patents and publications referred to herein are incorporated by reference in their entireties.

[0047] The term “in vivo” refers to an event that takes place in a subject's body.

[0048] The term “in vitro” refers to an event that takes places outside of a subject's body. In vitro assays encompass cell-based assays in which cells alive or dead are employed and may also encompass a cell-free assay in which no intact cells are employed.

[0049] The term “ex vivo” refers to an event which involves treating or performing a procedure on a cell, tissue and/or organ which has been removed from a subject's body. Aptly, the cell, tissue and/or organ may be returned to the subject's body in a method of surgery or treatment.

[0050] The term “reactive oxygen species” or “ROS” can refer to superoxide and its reduced oxygen derivatives and/or peroxynitrite (product of nitric oxide and superoxide interaction).

[0051] The term “superoxide dismutase” (SOD) can refer to a family of metalloproteins whose activity occurs in the detoxification of free oxygenated radicals, by catalyzing the dismutation of the superoxide anion (O⁻²) to hydrogen peroxide (H₂O₂). Various types of superoxide dismutase can be distinguished, among which there may be mentioned in particular copper-zinc superoxide dismutases (CuZnSOD), also known by the name superoxide dismutase-1, which, in eukaryotic organisms, are mainly located in the cytoplasm, and manganese superoxide dismutases (MnSOD), also known by the name superoxide dismutase-2, which are found mainly in prokaryotes and in the intracellular organelles of eukaryotic cells. The term “catalase” can refer to an enzymatically active polypeptide which catalyzes the decomposition of hydrogen peroxide to give water and oxygen.

[0052] The term “glutathione peroxidase” (GPX) can refer to enzymes which, similar to catalases, can catalyze the decomposition of hydrogen peroxide (H₂O₂) to form water and oxygen. The glutathione peroxidase family includes a plurality of glutathione peroxidase isoforms of which include glutathione peroxidases of type 1, 2, 3, 4, 5 and 6.

[0053] The term “IL-1” (also referred to herein as “IL1”) refers to the pro-inflammatory cytokine known as interleukin-1, and includes all forms of IL-1, including IL1-a and IL-1β, human and mammalian forms, conservative amino acid substitutions, glycoforms, biosimilars, and variants thereof. IL-1α and IL-1β bind to the same receptor molecule, which is called type I IL-1 receptor (IL-1RI). There is a third ligand of this receptor: Interleukin 1 receptor antagonist (IL-1Ra), which does not activate downstream signaling; therefore, acting as an inhibitor of IL-1α and IL-1β signaling by competing with them for binding sites of the receptor. See, e.g., Dinarello, Blood 117: 3720-32 (2011) and Weber et al., Science Signaling 3(105): cm1, doi: 10.1126/scisignal.3105 cm1. IL-1 is described, e.g., in Dinarello, Cytokine Growth Factor Rev. 8:253-65 (1997), the disclosures of which are incorporated by reference herein. For example, the term IL-1 encompasses human, recombinant forms of IL-1.

### Amino Acid Sequences of Interleukins.

| Identifier | Sequence (One-Letter Amino Acid Symbols) |
|---|---|
| SEQ ID NO: 1 | 10 20 30 40 50 |
| recombinant | MAKVPDMFED LKNCYSENEE DSSSIDHLSL NQKSFYHVSY GPLHEGCMDQ |
| human IL-1alpha | 60 70 80 90 100 |
| (rhIL-1α) | SVSLSISETS KTSKLTFKES MVVVATNGKV LKKRRLSLSQ SITDDDLEAI |
| | 110 120 130 140 150 |
| | ANDSEEEIIK PRSAPFSFLS NVKYNFMRII KYEFILNDAL NQSIIRANDQ |
| | 160 170 180 190 200 |
| | YLTAAALHNL DEAVKFDMGA YKSSKDDAKI TVILRISKTQ LYVTAQDEDQ |
| | 210 220 230 240 250 |
| | PVLLKEMPEI PKTITGSETN LLFFWETHGT KNYFTSVAHP NLFIATKQDY |
| | 260 270 |
| | WVCLAGGPPS ITDFQILENQ A |
| SEQ ID NO: 2 | 10 20 30 40 50 |
| recombinant | MAEVPELASE MMAYYSGNED DLFFEADGPK QMKCSFQDLD LCPLDGGIQL |
| human IL-1beta | 60 70 80 90 100 |
| (rhIL-1β) | RISDHHYSKG FRQAASVVVA MDKLRKMLVP CPQTFQENDL STFFPFIFEE |
| | 110 120 130 140 150 |
| | EPIFFDTWDN EAYVHDAPVR SLNCTLRDSQ QKSLVMSGPY ELKALHLQGQ |
| | 160 170 180 190 200 |
| | DMEQQVVFSM SFVQGEESND KIPVALGLKE KNLYLSCVLK DDKPTLQLES |
| | 210 220 230 240 250 |
| | VDPKNYPKKK MEKRFVFNKI EINNKLEFES AQFPNWYIST SQAENMPVFL |
| | 260 |
| | GGTKGGQDIT DFTMQFVSS |
| SEQ ID NO: 3 | 10 20 30 40 50 |
| recombinant | MAKVPDLFED LKNCYSENED YSSAIDHLSL NQKSFYDASY GSLHETCTDQ |
| mouse IL-1alpha | 60 70 80 90 100 |
| (rmIL-1α) | FVSLRTSETS KMSNFTFKES RVTVSATSSN GKILKKRRLS FSETFTEDDL |
| | 110 120 130 140 150 |
| | QSITHDLEET IQPRSAPYTY QSDLRYKLMK LVRQKFVMND SLNQTIYQDV |
| | 160 170 180 190 200 |
| | DKHYLSTTWL NDLQQEVKFD MYAYSSGGDD SKYPVTLKIS DSQLFVSAQG |
| | 210 220 230 240 250 |
| | EDQPVLLKEL PETPKLITGS ETDLIFFWKS INSKNYFTSA AYPELFIATK |
| | 260 270 |
| | EQSRVHLARG LPSMTDFQIS |
| SEQ ID NO: 4 | 10 20 30 40 50 |
| recombinant | MATVPELNCE MPPFDSDEND LFFEVDGPQK MKGCFQTFDL GCPDESIQLQ |
| mouse IL-1beta | 60 70 80 90 100 |
| (rmIL-1β) | ISQQHINKSF RQAVSLIVAV EKLWQLPVSF PWTFQDEDMS TFFSFIFEEE |
| | 110 120 130 140 150 |
| | PILCDSWDDD DNLLVCDVPI RQLHYRLRDE QQKSLVLSDP YELKALHING |
| | 160 170 180 190 200 |
| | QNINQQVIFS MSFVQGEPSN DKIPVALGLK GKNLYLSCVM KDGTPTLQLE |
| | 210 220 230 240 250 |
| | SVDPKQYPKK KMEKRFVFNK IEVKSKVEFE SAEFPNWYIS TSQAEHKPVF |
| | 260 |
| | LGNNSGQDII DFTMESVSS |
| SEQ ID NO: 5 | 10 20 30 40 50 |
| recombinant | MEICRGLRSH LITLLLFLFH SETICRPSGR KSSKMQAFRI WDVNQKTFYL |
| human IL-1 | 60 70 80 90 100 |
| receptor | RNNQLVAGYL QGPNVNLEEK IDVVPIEPHA LFLGIHGGKM CLSCVKSGDE |
| antagonist | 110 120 130 140 150 |
| (rhIL-1Ra) | TRLQLEAVNI TDLSENRKQD KRFAFIRSDS GPTTSFESAA CPGWFLCTAM |
| | 160 170 |
| | EADQPVSLTN MPDEGVMVTK FYFQEDE |
| SEQ ID NO: 6 | 10 20 30 40 50 |
| recombinant | MEICWGPYSH LISLLLILLF HSEAACRPSG KRPCKMQAFR IWDTNQKTFY |
| mouse IL-1 | 60 70 80 90 100 |
| receptor | LRNNQLIAGY LQGPNIKLEE KIDMVPIDLH SVFLGIHGGK LCLSCAKSGD |
| antagonist | 110 120 130 140 150 |
| (rmIL-1Ra) | DIKLQLEEVN ITDLSKNKEE DKRFTFIRSE KGPTTSFESA ACPGWFLCTT |
| | 160 170 |
| | LEADRPVSLT NTPEEPLIVT KFYFQEDQ |

[0055] The term “NLRP3 inflammasome” refers to the multiprotein complex responsible for the activation of some inflammatory responses. The NMRP3 inflammasome promotes the production of functional pro-inflammatory cytokines, for example, IL-1β and IL-18. Core components of the NLRP3 inflammasome are NLRP3, ASC (apoptosis-associated speck-like protein containing a CARD), and caspase-1, as described by Lee et al., Lipids Health Dis. 16:271 (2017) and Groslambert and Py, J. Inflamm. Res. 11:359-374 (2018).

[0056] The terms “matrix metalloproteinase” and “MMP” are defined to be any one of the members of the matrix metalloproteinase family of zinc-endopeptidaes, for example, as characterized by Fanjul-Fernandez et al., Biochem. Biophys. Acta 1803:3-19 (2010). In the art, family members are frequently referred to as archetypical MMPs, gelatinases, matrilysins, and/or furin-activatable MMPs. As used herein, the “matrix metalloproteinase” and “MMP” encompass the entire MMP family, including, but not limited to MMP-1, MMP-2, MMP-3, MMP-7, MMP-8, MMP-9, MMP-10, MMP-11, MMP-12, MMP-13, MMP-14, MMP-15, MMP-16, MMP-17, MMP-18, MMP-19, MMP-20, MMP-21, MMP-23, MMP-25, MMP-26, MMP-27 and MMP-28.

[0057] The terms “co-administration,” “co-administering,” “administered in combination with,” “administering in combination with,” “simultaneous,” and “concurrent,” as used herein, encompass administration of two or more active pharmaceutical ingredients (in a preferred embodiment of the present disclosure, for example, at least one anti-inflammatory compound in combination with a viral vector functionally engineered to deliver a gene-editing nucleic acid as described herein) to a subject so that both active pharmaceutical ingredients and/or their metabolites are present in the subject at the same time. Co-administration includes simultaneous administration in separate compositions, administration at different times in separate compositions, or administration in a composition in which two or more active pharmaceutical ingredients are present. Simultaneous administration in separate compositions and administration in a composition in which both agents are present are preferred.

[0058] The term “effective amount” or “therapeutically effective amount” refers to that amount of a composition or combination of compositions as described herein that is sufficient to effect the intended application including, but not limited to, disease treatment. A therapeutically effective amount may vary depending upon the intended application (in vitro or in vivo), or the subject and disease condition being treated (e.g., the weight, age and gender of the subject), the severity of the disease condition, or the manner of administration. The term also applies to a dose that will induce a particular response in target cells (e.g., the reduction of platelet adhesion and/or cell migration). The specific dose will vary depending on the particular compositions chosen, the dosing regimen to be followed, whether the composition is administered in combination with other compositions or compounds, timing of administration, the tissue to which it is administered, and the physical delivery system in which the composition is carried.

[0059] The terms “treatment”, “treating”, “treat”, and the like, refer to obtaining a desired pharmacologic and/or physiologic effect. The effect may be prophylactic in terms of completely or partially preventing a disease or symptom thereof and/or may be therapeutic in terms of a partial or complete cure for a disease and/or adverse effect attributable to the disease. For example, a composition, method, or system of the present disclosure may be administered as a prophylactic treatment to a subject that has a predisposition for a given condition (e.g., arthritis). “Treatment”, as used herein, covers any treatment of a disease in a mammal, particularly in a human, canine, feline, or equine, and includes: (a) preventing the disease from occurring in a subject which may be predisposed to the disease but has not yet been diagnosed as having it; (b) inhibiting the disease, i.e., arresting its development or progression; and (c) relieving the disease, i.e., causing regression of the disease and/or relieving one or more disease symptoms. “Treatment” is also meant to encompass delivery of an agent in order to provide for a pharmacologic effect, even in the absence of a disease or condition. For example, “treatment” encompasses delivery of a composition that can elicit an immune response or confer immunity in the absence of a disease condition, e.g., in the case of a vaccine. It is understood that compositions and methods of the present disclosure are applicable to treat all mammals, including, but not limited to human, canine, feline, equine, and bovine subjects.

[0060] The term “heterologous” when used with reference to portions of a nucleic acid or protein indicates that the nucleic acid or protein comprises two or more subsequences that are not found in the same relationship to each other in nature. For instance, the nucleic acid is typically recombinantly produced, having two or more sequences from unrelated genes arranged to make a new functional nucleic acid, e.g., a promoter from one source and a coding region from another source, or coding regions from different sources. Similarly, a heterologous protein indicates that the protein comprises two or more subsequences that are not found in the same relationship to each other in nature (e.g., a fusion protein).

[0061] The terms “polynucleotide,” “nucleotide,” and “nucleic acid” are used interchangeably herein to refer to all forms of nucleic acid, oligonucleotides, including deoxyribonucleic acid (DNA) and ribonucleic acid (RNA). Polynucleotides include genomic DNA, cDNA and antisense DNA, and spliced or unspliced mRNA, rRNA, tRNA, lncRNA, RNA antagomirs, and inhibitory DNA or RNA (RNAi, e.g., small or short hairpin (sh)RNA, microRNA (miRNA), aptamers, small or short interfering (si)RNA, trans-splicing RNA, or antisense RNA). Polynucleotides also include non-coding RNA, which include for example, but are not limited to, RNAi, miRNAs, lncRNAs, RNA antagomirs, aptamers, and any other non-coding RNAs known to those of skill in the art. Polynucleotides include naturally occurring, synthetic, and intentionally altered or modified polynucleotides as well as analogues and derivatives. The term “polynucleotide” also refers to a polymeric form of nucleotides of any length, including deoxyribonucleotides or ribonucleotides, or analogs thereof, and is synonymous with nucleic acid sequence. A polynucleotide may comprise modified nucleotides, such as methylated nucleotides and nucleotide analogs, and may be interrupted by non-nucleotide components. If present, modifications to the nucleotide structure may be imparted before or after assembly of the polymer. The term polynucleotide, as used herein, refers interchangeably to double- and single-stranded molecules. Unless otherwise specified or required, any embodiment as described herein encompassing a polynucleotide encompasses both the double-stranded form and each of two complementary single-stranded forms known or predicted to make up the double-stranded form. Polynucleotides can be single, double, or triplex, linear or circular, and can be of any length. In discussing polynucleotides, a sequence or structure of a particular polynucleotide may be described herein according to the convention of providing the sequence in the 5′ to 3′ direction.

[0062] The term “gene” or “nucleotide sequence encoding a polypeptide” refers to the segment of DNA involved in producing a polypeptide chain. The DNA segment may include regions preceding and following the coding region (leader and trailer) involved in the transcription/translation of the gene product and the regulation of the transcription/translation, as well as intervening sequences (introns) between individual coding segments (exons). For example, a gene includes a polynucleotide containing at least one open reading frame capable of encoding a particular protein or polypeptide after being transcribed and translated.

[0063] The term “homologous” in terms of a nucleotide sequence includes a nucleotide (nucleic acid) sequence that is either identical or substantially similar to a known reference sequence. In one embodiment, the term “homologous nucleotide sequence” is used to characterize a sequence having nucleic acid sequence that is at least 70%, at least 75%, at least 80%, at least 85%, at least 90%, at least 95%, at least 96%, at least 97%, at least 98%, at least 99%, or 100% identical to a known reference sequence.

[0064] “Heterologous” means derived from a genotypically distinct entity from the rest of the entity to which it is being compared to. For example, a polynucleotide introduced by genetic engineering techniques into a plasmid or vector derived from a different species is a heterologous polynucleotide. A promoter removed from its native coding sequence and operatively linked to a coding sequence it is not naturally found linked to a heterologous promoter. Although the term “heterologous” is not always used herein in reference to polynucleotides, reference to a polynucleotide even in the absence of the modifier “heterologous” is intended to include heterologous polynucleotides in spite of the omission.

[0065] The terms “sequence identity,” “percent identity,” and “sequence percent identity” (or synonyms thereof, e.g., “99% identical”) in the context of two or more nucleic acids or polypeptides, refer to two or more sequences or subsequences that are the same or have a specified percentage of nucleotides or amino acid residues that are the same, when compared and aligned (introducing gaps, if necessary) for maximum correspondence, not considering any conservative amino acid substitutions as part of the sequence identity. The percent identity can be measured using sequence comparison software or algorithms or by visual inspection. Various algorithms and software are known in the art that can be used to obtain alignments of amino acid or nucleotide sequences. Suitable programs to determine percent sequence identity include for example the BLAST suite of programs available from the U.S. Government's National Center for Biotechnology Information BLAST web site. Comparisons between two sequences can be carried using either the BLASTN or BLASTP algorithm. BLASTN is used to compare nucleic acid sequences, while BLASTP is used to compare amino acid sequences. ALIGN, ALIGN-2 (Genentech, South San Francisco, California) or MegAlign, available from DNASTAR, are additional publicly available software programs that can be used to align sequences. ClustalW and ClustalX may be used to produce alignments, Larkin et al., Bioinformatics 23:2947-2948 (2007); Goujon et al., Nucleic Acids Research, 38 Suppl: W 695-9 (2010); and, McWilliam et al., Nucleic Acids Research 41 (Web Server issue): W 597-600 (2013). One skilled in the art can determine appropriate parameters for maximal alignment by particular alignment software. In certain embodiments, the default parameters of the alignment software are used.

[0066] As used herein, the term “variant” encompasses but is not limited to antibodies or fusion proteins which comprise an amino acid sequence which differs from the amino acid sequence of a reference antibody by way of one or more substitutions, deletions and/or additions at certain positions within or adjacent to the amino acid sequence of the reference antibody. The variant may comprise one or more conservative substitutions in its amino acid sequence as compared to the amino acid sequence of a reference antibody. Conservative substitutions may involve, e.g., the substitution of similarly charged or uncharged amino acids. The variant retains the ability to specifically bind to the antigen of the reference antibody. The term variant also includes pegylated antibodies or proteins.

[0067] “Joint disease” is defined as measurable abnormalities in the cells or tissues of the joint that could lead to illness, for example, metabolic and molecular derangements triggering anatomical and/or physiological changes in the joint. Including, but not limited to, radiographic detection of joint space narrowing, subchondral sclerosis, subchondral cysts, and osteophyte formation.

[0068] “Joint illness” is defined in human subjects as symptoms that drive the subject to seek medical intervention, for example, subject reported pain, stiffness, swelling, or immobility. For non-human mammals, “joint illness” is defined, for example, as lameness, observable changes in gait, weight bearing, allodynia, or exploratory behavior.

[0069] As used herein, a sgRNA (single guide RNA) is a RNA, preferably a synthetic RNA, composed of a targeting sequence and scaffold. It is used to guide Cas9 to a specific genomic locus in genome engineering experiments. The sgRNA can be administered or formulated, e.g., as a synthetic RNA, or as a nucleic acid comprising a sequence encoding the gRNA, which is then expressed in the target cells. As would be evident to one of ordinary skill in the art, various tools may be used to design and/or optimize the sequence of a sgRNA, for example to increase the specificity and/or precision of genomic editing. In general, candidate sgRNAs may be designed by identifying a sequence within the target region that has a high predicted on-target efficiency and low off-target efficiency based on any of the available web-based tools. Candidate sgRNAs may be further assessed by manual inspection and/or experimental screening. Examples of web-based tools include, without limitation, CRISPR seek, CRISPR Design Tool, Cas-OFFinder, E-CRISP, ChopChop, CasOT, CRISPR direct, CRISPOR, BREAKING-CAS, CrispRGold, and CCTop. See, e.g., Safari, et al. Current Pharma. Biotechol. (2017) 18(13), which is incorporated by reference herein in its entirety for all purposes. Such tools are also described, for example, in PCT Publication No. WO2014093701A1 and Liu, et al., “Computational approached for effective CRISPR guide RNA design and evaluation”, Comput Struct Biotechnol J., 2020; 18: 35-44, each of which is incorporated by reference herein in its entirety for all purposes.

[0070] As used herein, “Cas9” refers to CRISPR Associated Protein; the Cas9 nuclease is the active enzyme for the Type II CRISPR system. “nCas9” refers to a Cas9 that has one of the two nuclease domains inactivated, i.e., either the RuvC or HNH domain. nCas9 is capable of cleaving only one strand of target DNA (a “nickase”). The term “Cas9” refers to an RNA-guided double-stranded DNA-binding nuclease protein or nickase protein, or a variant thereof. Herein, “Cas9” refers to both naturally-occurring and recombinant Cas9s. Wild-type Cas9 nuclease has two functional domains, e.g., RuvC and HNH, that cut different DNA strands. Cas9 enzymes described herein can comprise a HNH or HNH-like nuclease domain and/or a RuvC or RuvC-like nuclease domain. Cas9 can induce double-strand breaks in genomic DNA (target locus) when both functional domains are active. The Cas9 enzyme can comprise one or more catalytic domains of a Cas9 protein derived from bacteria belonging to the group consisting of Corynebacter, Sutterella, Legionella, Treponema, Filifactor, Eubacterium, Streptococcus, Lactobacillus, Mycoplasma, Bacteroides, Flaviivola, Flavobacterium, Sphaerochaeta, Azospirillum, Gluconacetobacter, Neisseria, Roseburia, Parvibaculum, Staphylococcus, Nitratifractor, and Campylobacter. In some embodiments, the two catalytic domains are derived from different bacteria species.

[0071] As used herein, “PAM” refers to a Protospacer Adjacent Motif and is necessary for Cas9 to bind target DNA, and immediately follows the target sequence. The Cas9 can be administered or formulated, e.g., as a protein (e.g., a recombinant protein), or as a nucleic acid comprising a sequence encoding the Cas9 protein, which is then expressed in the target cells. Naturally occurring Cas9 molecules recognize specific PAM sequences (e.g., the PAM recognition sequences for S. pyogenes, S. thermophilus, S. mutans, S. aureus and N. meningitidis). In an embodiment, a Cas9 molecule has the same PAM specificities as a naturally occurring Cas9 molecule. In other embodiments, a Cas9 molecule has a PAM specificity not associated with a naturally occurring Cas9 molecule. In other embodiments, a Cas9 molecule's PAM specificity is not associated with the naturally occurring Cas9 molecule to which it has the closest sequence homology. For example, a naturally occurring Cas9 molecule can be altered such that the PAM sequence recognition is altered to decrease off target sites, improve specificity, or eliminate a PAM recognition requirement. In an embodiment, a Cas9 molecule may be altered (e.g., to lengthen a PAM recognition sequence, improve Cas9 specificity to high level of identity, to decrease off target sites, and/or increase specificity). In an embodiment, the length of the PAM recognition sequence is at least 4, 5, 6, 7, 8, 9, 10 or 15 amino acids in length. In some embodiments, a Cas9 molecule may be altered to ablate PAM recognition.

[0072] An “expression cassette” is a nucleic acid construct, generated recombinantly or synthetically, with a series of specified nucleic acid elements that permit transcription of a particular polynucleotide sequence in a host cell. An expression cassette or vector may be part of a plasmid, viral genome, or nucleic acid fragment. Typically, an expression cassette or vector includes a polynucleotide to be transcribed, operably linked to a promoter.

[0073] The term “promoter” is used herein to refer to an array of nucleic acid control sequences that direct transcription of a nucleic acid. As used herein, a promoter includes necessary nucleic acid sequences near the start site of transcription, such as, in the case of a polymerase II type promoter, a TATA element. A promoter also optionally includes distal enhancer or repressor elements, which can be located as much as several thousand base pairs from the start site of transcription. Other elements that may be present in an expression vector include those that enhance transcription (e.g., enhancers) and terminate transcription (e.g., terminators), as well as those that confer certain binding affinity or antigenicity to the recombinant protein produced from the expression vector.

[0074] The term “operably linked” refers to a juxtaposition of genetic elements, wherein the elements are in a relationship permitting them to operate in the expected manner. For instance, a promoter is operatively linked to a coding region if the promoter helps initiate transcription of the coding sequence. There may be intervening residues between the promoter and coding region so long as this functional relationship is maintained.

[0075] An “isolated” plasmid, nucleic acid, vector, virus, virion, host cell, or other substance refers to a preparation of the substance devoid of at least some of the other components present where the substance or a similar substance naturally occurs or from which it is initially prepared. Thus, for example, an isolated substance may be prepared by using a purification technique to enrich it from a source mixture. Enrichment can be measured on an absolute basis, such as weight per volume of solution, or it can be measured in relation to a second, potentially interfering substance present in the source mixture. Increasing enrichments of the embodiments of this disclosure are increasingly more isolated. An isolated plasmid, nucleic acid, vector, virus, host cell, or other substance is in some embodiments purified, e.g., from about 80% to about 90% pure, at least about 90% pure, at least about 95% pure, at least about 98% pure, or at least about 99%, or more, pure.

[0076] An “AAV vector” as used herein refers to an AAV vector nucleic acid sequence encoding for various nucleic acid sequences, including in some embodiments a variant or chimeric capsid polypeptide (i.e., the AAV vector comprises a nucleic acid sequence encoding for a variant or chimeric capsid polypeptide). AAV vectors can also comprise a heterologous nucleic acid sequence not of AAV origin as part of the nucleic acid insert. This heterologous nucleic acid sequence typically comprises a sequence of interest for the genetic transformation of a cell. In general, the heterologous nucleic acid sequence is flanked by at least one, and generally by two AAV inverted terminal repeat sequences (ITRs). In certain embodiments, a Cas sequence, a guide RNA sequence, and any other genetic element (e.g., a promoter sequence, a PAM sequence, and the like) may be on the same AAV vector or on two or more different AAV vectors when administered to a subject. In certain embodiments, a Cas sequence, a guide RNA sequence, and any other genetic element (e.g., a promoter sequence, a PAM sequence, and the like) may be on two or more different AAV vectors when administered to a subject, and the AAV may be the same serotype, or the AAV may be two or more different serotypes (e.g., AAV5 and AAV6).

[0077] An “AAV virion” or “AAV virus” or “AAV viral particle” or “AAV vector particle” refers to a viral particle composed of at least one AAV capsid polypeptide and an encapsidated polynucleotide AAV transfer vector. If the particle comprises a heterologous nucleic acid (i.e. a polynucleotide other than a wild-type AAV genome, such as a transgene to be delivered to a cell), it can be referred to as an “AAV vector particle” or simply an “AAV vector”. Thus, production of AAV virion or AAV particle necessarily includes production of AAV vector as such a vector is contained within an AAV virion or AAV particle.

[0078] “Carrier” or “vehicle” as used herein refer to carrier materials suitable for drug administration. Carriers and vehicles useful herein include any such materials known in the art, e.g., any liquid, gel, solvent, liquid diluent, solubilizer, surfactant, or the like, which is nontoxic and which does not interact with other components of the composition in a deleterious manner.

[0079] The phrase “pharmaceutically acceptable” refers to those compounds, materials, compositions, and/or dosage forms that are, within the scope of sound medical judgment, suitable for use in contact with the tissues of human beings and animals without excessive toxicity, irritation, allergic response, or other problems or complications commensurate with a reasonable benefit/risk ratio.

[0080] The terms “pharmaceutically acceptable carrier” or “pharmaceutically acceptable excipient” are intended to include any and all solvents, dispersion media, coatings, antibacterial and antifungal agents, isotonic and absorption delaying agents, and inert ingredients. The use of such pharmaceutically acceptable carriers or pharmaceutically acceptable excipients for active pharmaceutical ingredients is well known in the art. Except insofar as any conventional pharmaceutically acceptable carrier or pharmaceutically acceptable excipient is incompatible with the active pharmaceutical ingredient, its use in the therapeutic compositions of the disclosure is contemplated. Additional active pharmaceutical ingredients, such as other drugs, can also be incorporated into the described compositions and methods.

[0081] The term “pharmaceutically acceptable excipient” is intended to include vehicles and carriers capable of being co-administered with a compound to facilitate the performance of its intended function. The use of such media for pharmaceutically active substances is well known in the art. Examples of such vehicles and carriers include solutions, solvents, dispersion media, delay agents, emulsions and the like. Any other conventional carrier suitable for use with the multi-binding compounds also falls within the scope of the present disclosure.

[0082] As used herein, the term “a”, “an”, or “the” generally is construed to cover both the singular and the plural forms.

[0083] The terms “about” and “approximately” mean within a statistically meaningful range of a value. Such a range can be within an order of magnitude, preferably within 50%, more preferably within 20%, more preferably still within 10%, and even more preferably within 5% of a given value or range. The allowable variation encompassed by the terms “about” or “approximately” depends on the particular system under study, and can be readily appreciated by one of ordinary skill in the art. Moreover, as used herein, the terms “about” and “approximately” mean that compositions, amounts, formulations, parameters, shapes and other quantities and characteristics are not and need not be exact, but may be approximate and/or larger or smaller, as desired, reflecting tolerances, conversion factors, rounding off, measurement error and the like, and other factors known to those of skill in the art. In general, a dimension, size, formulation, parameter, shape or other quantity or characteristic is “about” or “approximate” whether or not expressly stated to be such. It is noted that embodiments of very different sizes, shapes and dimensions may employ the described arrangements.

[0084] The term “substantially” as used herein can refer to a majority of, or mostly, as in at least about 50%, 60%, 70%, 80%, 90%, 95%, 96%, 97%, 98%, 99%, 99.5%, 99.9%, 99.99%, or at least about 99.999% or more.

[0085] The transitional terms “comprising,” “consisting essentially of,” and “consisting of,” when used in the appended claims, in original and amended form, define the claim scope with respect to what unrecited additional claim elements or steps, if any, are excluded from the scope of the claim(s). The term “comprising” is intended to be inclusive or open-ended and does not exclude any additional, unrecited element, method, step or material. The term “consisting of” excludes any element, step or material other than those specified in the claim and, in the latter instance, impurities ordinary associated with the specified material(s). The term “consisting essentially of” limits the scope of a claim to the specified elements, steps or material(s) and those that do not materially affect the basic and novel characteristic(s) of the claimed methods and compositions. All compositions, methods, and kits described herein that embody the present disclosure can, in alternate embodiments, be more specifically defined by any of the transitional terms “comprising,” “consisting essentially of,” and “consisting of.”

[0086] A subject treated by any of the methods or compositions described herein can be of any age and can be an adult, infant or child. In some cases, the subject is 0, 1, 2, 3, 4, 5, 6, 7, 8, 9, 10, 11, 12, 13, 14, 15, 16, 17, 18, 19, 20, 21, 22, 23, 24, 25, 26, 27, 28, 29, 30, 31, 32, 33, 34, 35, 36, 37, 38, 39, 40, 41, 42, 43, 44, 45, 46, 47, 48, 49, 50, 51, 52, 53, 54, 55, 56, 57, 58, 59, 60, 61, 62, 63, 64, 65, 66, 67, 68, 69, 70, 71, 72, 73, 74, 75, 76, 77, 78, 79, 80, 81, 82, 83, 84, 85, 86, 87, 88, 89, 90, 91, 92, 93, 94, 95, 96, 97, 98, or 99 years old, or within a range therein (e.g., without limitation, between 2 and 20 years old, between 20 and 40 years old, or between 40 and 90 years old). The subject can be a human or non-human subject. A particular class of subjects that can benefit from the compositions and methods of the present disclosure include subjects over the age of 40, 50, or 60 years. Another class of subjects that can benefit from the compositions and methods of the present disclosure are subjects that have arthritis (e.g., osteoarthritis).

[0087] Any of the compositions disclosed herein can be administered to a non-human subject, such as a laboratory or farm animal. Non-limiting examples of a non-human subject include laboratory or research animals, pets, wild or domestic animals, farm animals, etc., e.g., a dog, a goat, a guinea pig, a hamster, a mouse, a pig, a non-human primate (e.g., a gorilla, an ape, an orangutan, a lemur, a baboon, etc.), a rat, a sheep, a horse, a cow, or the like.

[0088] The present disclosure provides compositions useful for treating joint disorders with an inflammatory component. In some aspects, the compositions are useful to prevent the progression of osteoarthritis and to treat osteoarthritis in a mammalian joint.

[0089] In some aspects, the pharmaceutical composition comprises a gene-editing system, wherein the gene-editing system causes expression the at least one genetic locus related to joint function to be silenced or reduced in at least a portion of the cells comprising the joint.

[0090] In an aspect, the pharmaceutical composition comprises a gene-editing system, wherein the gene-editing system targets one or more genes selected from Table 1 and/or genes described in FIG. 20. In an aspect, the pharmaceutical composition comprises a gene-editing system, wherein the gene-editing system targets superoxide dismutase. In an aspect, the pharmaceutical composition comprises a gene-editing system, wherein the gene-editing system targets catalase. In an aspect, the pharmaceutical composition comprises a gene-editing system, wherein the gene-editing system targets glutathione peroxidase. In an aspect, the pharmaceutical composition comprises a gene-editing system, wherein the gene-editing system targets one or more of TNF-α, IL-6, IL-8, IL-18, a matrix metalloproteinase (MMP), or components of the NLRP3 inflammasome.

[0091] In some aspects, the pharmaceutical composition comprises a gene-editing system, wherein the gene-editing comprises the use of a programmable nuclease that mediates the generation of a double-strand or single-strand break at the at least one locus related to joint function. In some embodiments, the gene-editing system reduces the gene expression of the targeted locus or targeted loci. In some embodiments, the at least one locus related to joint tissue is silenced or reduced in at least a portion of the cells comprising the joint.

[0092] In some aspects, the cells comprising the joint are synoviocytes. In some aspects, the cells are synovial macrophages. In some aspects, the cells are synovial fibroblasts. In some aspects at least a portion of the synoviocytes are edited. In some aspects, the cells comprising the joint are chondrocytes.

[0093] In an aspect, the pharmaceutical composition targets the one or more genes selected from Table 1 and/or genes described in FIG. 20, including without limitation cytokine and/or growth factor genes, and/or a component of the NLRP3 inflammasome. In some embodiments, the component of the NLRP3 inflammasome comprises NLRP3, ASC (apoptosis-associated speck-like protein containing a CARD), caspase-1, and combinations thereof.

[0094] Pharmaceutical compositions are also provided, wherein the gene-editing causes expression of one or more genes to be enhanced in at least a portion of the cells comprising the joint, the gene(s) being selected from Table 1 and/or genes described in FIG. 20, including without limitation cytokine and/or growth factor genes.

[0095] In some embodiments, the pharmaceutical composition provides for gene-editing, wherein the gene-editing comprises the use of a programmable nuclease that mediates the generation of a double-strand or single-strand break at said one or more genes selected from Table 1 and/or genes described in FIG. 20, including without limitation cytokine and/or growth factor genes. In some embodiments, the gene-editing comprises one or more methods selected from a CRISPR method, a TALE method, a zinc finger method, and a combination thereof.

[0096] In an aspect, the gene-editing comprises a CRISPR method. In yet other aspects, the CRISPR method is a CRISPR-Cas9 method. In some aspects, the Cas9 is mutated to enhance function.

### Animal Models of Osteoarthritis

[0097] Several animal models for osteoarthritis are known to the art. Exemplary nonlimiting animal models are summarized; however, it is understood that various models may be used. Many different species of animals are used to mimic OA, for example, studies have been conducted on mice, rats, rabbits, guinea pigs, dogs, pigs, horses, and even other animals. See, e.g., Kuyinu et al., J Orthop Surg Res. 11:19 (2016) (hereinafter “Kuyinu, 2016”).

[0098] It is understood that the various methods for inducing OA may be used in any mammal. In the mouse, spontaneous, chemically induced, surgically induced, and non-invasive induction are commonly used. E.g., Kuyinu, 2016; Bapat et al., Clin Transl Med. 7:36 (2018) (hereinafter “Bapat, 2018”); and Poulet, Curr Rheumatol Rep 18:40 (2016). In the horse, osteochondral fragment-exercise model, chemical induction, traumatic induction, and induction through overuse are commonly used. In sheep, surgical induction is most common; in the guinea pig, surgical induction, chemical induction, and spontaneous (Durkin Hartley) methods are frequently used. E.g. Bapat, 2018.

[0099] The destabilized medial meniscus (DMM) is frequently used in mice to model posttraumatic osteoarthritis, e.g. Culley et al., Methods Mol Biol. 1226:143-73 (2015). The DMM model mimics clinical meniscal injury, a known predisposing factor for the development of human OA, and permits the study of structural and biological changes over the course of the disease. Mice are an attractive model organism, because mouse strains with defined genetic backgrounds may be used. Additionally, knock-out or other genetically manipulated mouse strains may be used to evaluate the importance of various molecular pathways in the response to various OA treatment modalities and regimens. For example, STR/ort mice have features that make the strain particularly susceptible to developing OA, including, increased levels of the inflammatory cytokine IL1β, Bapat et al., Clin Transl Med. 7:36 (2018). These mice commonly develop OA in knee, ankle, elbow, and temporo-mandibular joints, Jaeger et al., Osteoarthritis Cartilage 16:607-614 (2008). Other useful mutant strains of mice are known to the skilled artisan, for example, Col9a1(−/−) mice, Allen et al., Arthritis Rheum, 60:2684-2693 (2009).

[0100] Another commonly used surgical model for OA is anterior cruciate ligament transection (ACLT) model. Little and Hunter, Nat Rev Rheumatol., 9(8):485-497 (2013). The subject's ACL is surgically transected causing joint destabilization. The anterior drawer test with the joint flexed is used to confirm that transection of the ligament has occurred. In some cases, other ligaments such as the posterior cruciate ligament, medial collateral ligament, lateral collateral ligament, and/or either meniscus may be transected. As with the DMM model, a variety of mouse strains may be used to investigate various molecular pathways.

[0101] Depending on the technical objective, animals of varying size may be selected for use. Rodents are useful because of the short time needed for skeletal maturity and consequently shorter time to develop OA following surgical or other technique to induce OA. Larger animals are particularly useful to evaluate therapeutic interventions. The anatomy in larger animals is very similar to humans; for example, in dogs the cartilage thickness is less than about half the thickness of humans; this striking similarity is exemplary of why such cartilage degeneration and osteochondral defects studies are much more useful in large animal models. E.g. McCoy, Vet. Pathol., 52:803-18 (2015); and, Pelletier et al., Therapy, 7:621-34(2010).

### Gene-Editing Processes

### Overview: Compositions to Gene-Edit Synovial Cells

[0102] Embodiments of the present disclosure are directed to methods for gene-editing synovial cells (synoviocytes), the methods comprising one or more steps of gene-editing at least a portion of the synoviocytes in a joint to treat osteoarthritis or other joint disorder. As used herein, “gene-editing,” “gene editing,” and “genome editing” refer to a type of genetic modification in which DNA is permanently modified in the genome of a cell, e.g., DNA is inserted, deleted, modified or replaced within the cell's genome. In some embodiments, gene-editing causes the expression of a DNA sequence to be silenced (sometimes referred to as a gene knockout) or inhibited/reduced (sometimes referred to as a gene knockdown). In other embodiments, gene-editing causes the expression of a DNA sequence to be enhanced (e.g., by causing over-expression). In accordance with embodiments of the present disclosure, gene-editing technology is used to reduce the expression or silence pro-inflammatory genes and/or to enhance the expression of regenerative genes.

### Interleukins

[0103] According to additional embodiments, gene-editing methods of the present disclosure may be used to inhibit, reduce, or increase the expression of certain proteins encoded by one or more genes listed in Table 1 and/or genes described in FIG. 20, including without limitation cytokine and/or growth factor genes.

### Expression Constructs

[0104] Expression constructs encoding one or both of guide RNAs and/or Cas9 editing enzymes can be administered in any effective carrier, e.g., any formulation or composition capable of effectively delivering the component gene to cells in vivo. Approaches include, for example, electroporation and/or insertion of the gene in viral vectors, including recombinant retroviruses, adenovirus, adeno-associated virus, lentivirus, and herpes simplex virus-1, or recombinant bacterial or eukaryotic plasmids. Viral vectors transfect cells directly; plasmid DNA can be delivered naked or with the help of, for example, cationic liposomes (lipofectamine) or derivatized (e.g., antibody conjugated), polylysine conjugates, gramacidin S, artificial viral envelopes or other such intracellular carriers, as well as direct injection of the gene construct or CaPO4 precipitation carried out in vivo.

[0105] A preferred approach for in vivo introduction of nucleic acid into a cell is by use of a viral vector containing nucleic acid, e.g., a cDNA. Infection of cells with a viral vector has the advantage that a large proportion of the targeted cells can receive the nucleic acid. Additionally, molecules encoded within the viral vector, e.g., by a cDNA contained in the viral vector, are expressed efficiently in cells that have taken up viral vector nucleic acid.

[0106] Retrovirus vectors and adeno-associated virus vectors can be used as a recombinant gene delivery system for the transfer of exogenous genes in vivo, particularly into humans. These vectors provide efficient delivery of genes into cells. In some instances, the transferred nucleic acids are stably integrated into the chromosomal DNA of the host. In other instances, particularly for adeno-associated virus vectors, stable integration into the host DNA may be a rare event, resulting into episomal expression of the transgene and transient expression of the transgene.

[0107] The development of specialized cell lines (termed “packaging cells”) which produce only replication-defective retroviruses has increased the utility of retroviruses for gene therapy, and defective retroviruses are characterized for use in gene transfer for gene therapy purposes (for a review see Miller, Blood 76:271 (1990)). A replication defective retrovirus can be packaged into virions, which can be used to infect a target cell through the use of a helper virus by standard techniques. Protocols for producing recombinant retroviruses and for infecting cells in vitro or in vivo with such viruses can be found in Ausubel, et al., eds., Current Protocols in Molecular Biology, Greene Publishing Associates, (1989), Sections 9.10-9.14, and other standard laboratory manuals. Examples of suitable retroviruses include pLJ, pZIP, pWE and pEM which are known to those skilled in the art. Examples of suitable packaging virus lines for preparing both ecotropic and amphotropic retroviral systems include ΨCrip, ΨCre, Ψ2 and ΨAm. Retroviruses have been used to introduce a variety of genes into many different cell types, including epithelial cells, in vitro and/or in vivo (see, e.g., Eglitis, et al. (1985) Science 230:1395-1398; Danos and Mulligan (1988) Proc. Natl. Acad. Sci. USA 85:6460-6464; Wilson et al. (1988) Proc. Natl. Acad. Sci. USA 85:3014-3018; Armentano et al. (1990) Proc. Natl. Acad. Sci. USA 87:6141-6145; Huber et al. (1991) Proc. Natl. Acad. Sci. USA 88:8039-8043; Ferry et al. (1991) Proc. Natl. Acad. Sci. USA 88:8377-8381; Chowdhury et al. (1991) Science 254:1802-1805; van Beusechem et al. (1992) Proc. Natl. Acad. Sci. USA 89:7640-7644; Kay et al. (1992) Human Gene Therapy 3:641-647; Dai et al. (1992) Proc. Natl. Acad. Sci. USA 89:10892-10895; Hwu et al. (1993) J. Immunol. 150:4104-4115; U.S. Pat. Nos. 4,868,116; 4,980,286; PCT Application WO 89/07136; PCT Application WO 89/02468; PCT Application WO 89/05345; and PCT Application WO 92/07573, each of which is incorporated by reference herein in its entirety for all purposes).

[0108] Another viral gene delivery system useful in the present methods utilizes adenovirus-derived vectors. The genome of an adenovirus can be manipulated, such that it encodes and expresses a gene product of interest but is inactivated in terms of its ability to replicate in a normal lytic viral life cycle. See, for example, Berkner et al., BioTechniques 6:616 (1988); Rosenfeld et al., Science 252:431-434 (1991); and Rosenfeld et al., Cell 68:143-155 (1992). Suitable adenoviral vectors may be derived from any strain of adenovirus (e.g., Ad2, Ad3, Ad5, or Ad7 etc.), including Adenovirus serotypes from other species (e.g., mouse, dog, human, etc.) that are known to those skilled in the art. The virus particle is relatively stable and amenable to purification and concentration, and as above, can be modified so as to affect the spectrum of infectivity. Additionally, introduced adenoviral DNA (and foreign DNA contained therein) is not integrated into the genome of a host cell but remains episomal, thereby avoiding potential problems that can occur as a result of insertional mutagenesis in situ, where introduced DNA becomes integrated into the host genome (e.g., retroviral DNA). Moreover, the carrying capacity of the adenoviral genome for foreign DNA is large (up to 8 kilobases) relative to other gene delivery vectors (Berkner et al., supra; Haj-Ahmand and Graham, J. Virol. 57:267 (1986).

[0109] Helper-dependent (HDAd) vectors can also be produced with all adenoviral sequences deleted except the origin of DNA replication at each end of the viral DNA along with packaging signal at 5-prime end of the genome downstream of the left packaging signal. HDAd vectors are constructed and propagated in the presence of a replication-competent helper adenovirus that provides the required early and late proteins necessary for replication.

[0110] Yet another viral vector system useful for delivery of nucleic acids is the adeno-associated virus (AAV). Adeno-associated virus is a naturally occurring defective virus that requires another virus, such as an adenovirus or a herpes virus, as a helper virus for efficient replication and a productive life cycle. (For a review see Muzyczka et al., Curr. Topics in Micro. and Immunol. 158:97-129 (1992). It is also one of the few viruses that may integrate its DNA into non-dividing cells, and exhibits a high frequency of stable integration (see for example Flotte et al., Am. J. Respir. Cell. Mol. Biol. 7:349-356 (1992); Samulski et al., J. Virol. 63:3822-3828 (1989); and Mclaughlin et al., J. Virol. 62:1963-1973 (1989). Vectors containing as little as 300 base pairs of AAV can be packaged and can integrate. Space for exogenous DNA is limited to about 4.5 kb. An AAV vector such as that described in Tratschin et al., Mol. Cell. Biol. 5:3251-3260 (1985) can be used to introduce DNA into cells. A variety of nucleic acids have been introduced into different cell types using AAV vectors (see for example Hermonat et al., Proc. Natl. Acad. Sci. USA 81:6466-6470 (1984); Tratschin et al., Mol. Cell. Biol. 4:2072-2081 (1985); Wondisford et al., Mol. Endocrinol. 2:32-39 (1988); Tratschin et al., J. Virol. 51:611-619 (1984); and Flotte et al., J. Biol. Chem. 268:3781-3790 (1993). The identification of Staphylococcus aureus (SaCas9) and other smaller Cas9 enzymes that can be packaged into adeno-associated viral (AAV) vectors that are highly stable and effective in vivo, easily produced, approved by FDA, and tested in multiple clinical trials, paves new avenues for therapeutic gene editing.

[0111] In some embodiments, nucleic acids encoding a CRISPR gene editing complex (e.g., Cas9 or gRNA) for editing a gene selected from Table 1 and/or genes described in FIG. 20 are entrapped in liposomes bearing positive charges on their surface (e.g., lipofectins), which can be tagged with antibodies against cell surface antigens of the target cells. These delivery vehicles can also be used to deliver Cas9 protein/gRNA complexes.

[0112] In clinical settings, the gene delivery systems for the nucleic acids encoding a CRISPR gene editing complex can be introduced into a subject by any of a number of methods, each of which is familiar in the art. For instance, a pharmaceutical preparation of the gene delivery system can be introduced systemically, e.g., by intravenous injection, and specific transduction of the protein in the target cells will occur predominantly from specificity of transfection, provided by the gene delivery vehicle, cell-type or tissue-type expression due to the transcriptional regulatory sequences controlling expression of the receptor gene, or a combination thereof. In other embodiments, initial delivery of the nucleic acids encoding a CRISPR gene editing complex for editing a gene selected from Table 1 and/or genes described in FIG. 20 is more limited, with introduction into the subject being quite localized. For example, the nucleic acids encoding a CRISPR gene editing complex for editing a gene selected from Table 1 and/or genes described in FIG. 20 can be introduced by intra-articular injection into a joint exhibiting joint disease (e.g., osteoarthritis). In some embodiments, the nucleic acids encoding a CRISPR gene editing complex for editing a gene selected from Table 1 and/or genes described in FIG. 20, are administered during or after surgery; in some embodiments, a controlled-release hydrogel comprising the nucleic acids encoding a CRISPR gene editing complex for editing a gene selected from Table 1 and/or genes described in FIG. 20, is administered at the conclusion of surgery before closure to prevent reduce or eliminate osteoarthritis by providing a steady dose of the nucleic acids encoding a CRISPR gene editing complex for editing a gene selected from Table 1 and/or genes described in FIG. 20, over time.

[0113] A pharmaceutical preparation of the nucleic acids encoding a CRISPR gene editing complex for editing a gene selected from Table 1 and/or genes described in FIG. 20, can consist essentially of the gene delivery system (e.g., viral vector(s)) in an acceptable diluent, or can comprise a slow release matrix in which the gene delivery vehicle is embedded. Alternatively, where the complete gene delivery system can be produced intact from recombinant cells, e.g., adeno-associated viral vectors, the pharmaceutical preparation can comprise one or more cells, which produce the gene delivery system.

[0114] Preferably, the CRISPR gene editing complex for editing a gene selected from Table 1 and/or genes described in FIG. 20, is specific, i.e., induces genomic alterations preferentially at the target site, and does not induce alterations at other sites, or only rarely induces alterations at other sites. In certain embodiments, the CRISPR gene editing complex for editing a gene selected from Table 1 and/or genes described in FIG. 20, has an editing efficiency of at least 50%, at least 60%, at least 70%, at least 80%, at least 90%, at least 95%, or at least 99%.

[0115] The sgRNAs for use in the CRISPR/Cas system for HR typically include a guide sequence (e.g., crRNA) that is complementary to a target nucleic acid sequence (target gene locus) and a scaffold sequence (e.g., tracrRNA) that interacts with a Cas nuclease (e.g., Cas9 polypeptide) or a variant or fragment thereof. A single guide RNA (sgRNA) can include a crRNA and a tracrRNA.

[0116] Exemplary target sequences for inducing genomic alterations in the IL-1α or IL-1β gene by the CRISPR-Cas editing complex are provided in Tables 2 and 12. Exemplary guide RNAs for use with the compositions, methods, and systems of the present disclosure are provided in Tables 3 and 13.

TABLE 12
Exemplary Target IL-1α and IL-1β Gene Sequences

| Identi- | | | | Target | |
|---|---|---|---|---|---|
| fier | Genome | Gene | Exon | Sequence 5′-3′ | PAM |
| SEQ ID | Homo | IL-1α | 4 | GCCATAGCTTACAT | AGG |
| NO: 37 | sapiens | | | GATAGA | |
| SEQ ID | Homo | IL-1α | 4 | TCCTTCTATCATGT | TGG |
| NO: 38 | sapiens | | | AAGCTA | |
| SEQ ID | Homo | IL-1α | 4 | CCATGCAGCCTTCA | GGG |
| NO: 39 | sapiens | | | TGGAGT | |
| SEQ ID | Homo | IL-1α | 4 | TCCATGCAGCCTTC | TGG |
| NO: 40 | sapiens | | | ATGGAG | |
| SEQ ID | Homo | IL-1α | 4 | AGCTATGGCCCACT | AGG |
| NO: 41 | sapiens | | | CCATGA | |
| SEQ ID | Homo | IL-1α | 4 | ATTGATCCATGCAG | TGG |
| NO: 42 | sapiens | | | CCTTCA | |
| SEQ ID | Homo | IL-1α | 4 | CCCACTCCATGAAG | TGG |
| NO: 43 | sapiens | | | GCTGCA | |
| SEQ ID | Homo | IL-1α | 4 | GCTCTCCTTGAAGG | TGG |
| NO: 44 | sapiens | | | TAAGCT | |
| SEQ ID | Homo | IL-1α | 4 | TACCACCATGCTCT | AGG |
| NO: 45 | sapiens | | | CCTTGA | |
| SEQ ID | Homo | IL-1α | 4 | GCTTACCTTCAAGG | TGG |
| NO: 46 | sapiens | | | AGAGCA | |
| SEQ ID | Homo | IL-1α | 4 | TACCTTCAAGGAGA | TGG |
| NO: 47 | sapiens | | | GCATGG | |
| SEQ ID | Homo | IL-1α | 4 | ATGGTGGTAGTAGC | CGG |
| NO: 48 | sapiens | | | AACCAA | |
| SEQ ID | Homo | IL-1α | 4 | TGGTGGTAGTAGCA | GGG |
| NO: 49 | sapiens | | | ACCAAC | |
| SEQ ID | Homo | IL-1α | 4 | CTTCTTCAGAACCT | TGG |
| NO: 50 | sapiens | | | TCCCGT | |
| SEQ ID | Homo | IL-1α | 4 | GGTAGTAGCAACCA | AGG |
| NO: 51 | sapiens | | | ACGGGA | |
| SEQ ID | Homo | IL-1α | 4 | GGAAGGTTCTGAAG | CGG |
| NO: 52 | sapiens | | | AAGAGA | |
| SEQ ID | Homo | IL-1α | 4 | CTCCAGGTCATCAT | TGG |
| NO: 53 | sapiens | | | CAGTGA | |
| SEQ ID | Homo | IL-1α | 4 | CATCACTGATGATG | AGG |
| NO: 54 | sapiens | | | ACCTGG | |
| SEQ ID | Homo | IL-1α | 4 | AGTCATTGGCGATG | AGG |
| NO: 55 | sapiens | | | GCCTCC | |
| SEQ ID | Homo | IL-1α | 4 | TTCCTCTGAGTCAT | TGG |
| NO: 56 | sapiens | | | TGGCGA | |
| SEQ ID | Homo | IL-1β | 4 | TCCCATGTGTCGAA | AGG |
| NO: 57 | sapiens | | | GAAGAT | |
| SEQ ID | Homo | IL-1β | 4 | AACCTATCTTCTTC | TGG |
| NO: 58 | sapiens | | | GACACA | |
| SEQ ID | Homo | IL-1β | 4 | ACCTATCTTCTTCG | GGG |
| NO: 59 | sapiens | | | ACACAT | |
| SEQ ID | Homo | IL-1β | 4 | CTTCGACACATGGG | AGG |
| NO: 60 | sapiens | | | ATAACG | |
| SEQ ID | Homo | IL-1β | 4 | GTGCAGTTCAGTGA | AGG |
| NO: 61 | sapiens | | | TCGTAC | |
| SEQ ID | Homo | IL-1β | 4 | GATCACTGAACTGC | CGG |
| NO: 62 | sapiens | | | ACGCTC | |
| SEQ ID | Homo | IL-1β | 4 | ATCACTGAACTGCA | GGG |
| NO: 63 | sapiens | | | CGCTCC | |
| SEQ ID | Homo | IL-1β | 4 | CAAAAAAGCTTGGT | TGG |
| NO: 64 | sapiens | | | GATGTC | |
| SEQ ID | Homo | IL-1β | 4 | CCATATCCTGTCCC | TGG |
| NO: 65 | sapiens | | | TGGAGG | |
| SEQ ID | Homo | IL-1β | 4 | CTGAAAGCTCTCCA | GGG |
| NO: 66 | sapiens | | | CCTCCA | |
| SEQ ID | Homo | IL-1β | 4 | GCTCCATATCCTGT | AGG |
| NO: 67 | sapiens | | | CCCTGG | |
| SEQ ID | Homo | IL-1β | 4 | AGCTCTCCACCTCC | AGG |
| NO: 68 | sapiens | | | AGGGAC | |
| SEQ ID | Homo | IL-1β | 4 | GTTGCTCCATATCC | TGG |
| NO: 69 | sapiens | | | TGTCCC | |
| SEQ ID | Homo | IL-1β | 4 | GGACAGGATATGGA | AGG |
| NO: 70 | sapiens | | | GCAACA | |
| SEQ ID | Canis | IL-1α | 3 | GTCACAGCTCATAT | AGG |
| NO: 71 | familiaris | | | CATAGA | |
| SEQ ID | Canis | IL-1α | 3 | ACATGCAGTCCTCA | GGG |
| NO: 72 | familiaris | | | TGAAGT | |
| SEQ ID | Canis | IL-1α | 3 | GACATGCAGTCCTC | TGG |
| NO: 73 | familiaris | | | ATGAAG | |
| SEQ ID | Canis | IL-1α | 3 | GAGCTGTGACCCAC | AGG |
| NO: 74 | familiaris | | | TTCATG | |
| SEQ ID | Canis | IL-1α | 3 | GGATGTCTTTGAGA | AGG |
| NO: 75 | familiaris | | | TTTCAG | |
| SEQ ID | Canis | IL-1α | 3 | ATTTTCCTTGAAGG | GGG |
| NO: 76 | familiaris | | | TAAGCT | |
| SEQ ID | Canis | IL-1α | 3 | GACATCCCAGCTTA | AGG |
| NO: 77 | familiaris | | | CCTTCA | |
| SEQ ID | Canis | IL-1α | 3 | CTTCAAGGAAAATG | TGG |
| NO: 78 | familiaris | | | TGGTAG | |
| SEQ ID | Canis | IL-1α | 3 | GTGGTAGTGGTGGC | TGG |
| NO: 79 | familiaris | | | AGCCAA | |
| SEQ ID | Canis | IL-1α | 3 | TGGTAGTGGTGGCA | GGG |
| NO: 80 | familiaris | | | GCCAAT | |
| SEQ ID | Canis | IL-1α | 3 | CTTCTTTAGAATCT | TGG |
| NO: 81 | familiaris | | | TCCCAT | |
| SEQ ID | Canis | IL-1α | 3 | GGAAGATTCTAAAG | CGG |
| NO: 82 | familiaris | | | AAGAGA | |
| SEQ ID | Canis | IL-1α | 3 | AATGTCTTCCAGGT | CGG |
| NO: 83 | familiaris | | | CATCAT | |
| SEQ ID | Canis | IL-1α | 3 | ATTCATCACCGATG | TGG |
| NO: 84 | familiaris | | | ATGACC | |
| SEQ ID | Canis | IL-1α | 3 | ATTGCCAATGACAC | AGG |
| NO: 85 | familiaris | | | AGAAGA | |
| SEQ ID | Canis | IL-1β | 4 | CCTCATCTACCAGA | TGG |
| NO: 86 | familiaris | | | GAACTG | |
| SEQ ID | Canis | IL-1β | 4 | CCACAGTTCTCTGG | AGG |
| NO: 87 | familiaris | | | TAGATG | |
| SEQ ID | Canis | IL-1β | 4 | CACAGTTCTCTGGT | GGG |
| NO: 88 | familiaris | | | AGATGA | |
| SEQ ID | Canis | IL-1β | 4 | GCTGGTGGGAGACT | TGG |
| NO: 89 | familiaris | | | TGCAAC | |
| SEQ ID | Canis | IL-1β | 4 | ACTCTTGTTACAGA | GGG |
| NO: 90 | familiaris | | | GCTGGT | |
| SEQ ID | Canis | IL-1β | 4 | GACTCTTGTTACAG | TGG |
| NO: 91 | familiaris | | | AGCTGG | |
| SEQ ID | Canis | IL-1β | 4 | TCAGACTCTTGTTA | TGG |
| NO: 92 | familiaris | | | CAGAGC | |
| SEQ ID | Canis | IL-1β | 4 | AGCTCTGTAACAAG | AGG |
| NO: 93 | familiaris | | | AGTCTG | |
| SEQ ID | Canis | IL-1β | 4 | CGTGTCAGTCATTG | TGG |
| NO: 94 | familiaris | | | TAGCTT | |
| SEQ ID | Canis | IL-1β | 4 | TCCTGGAGGACCTG | GGG |
| NO: 95 | familiaris | | | TGGGCA | |
| SEQ ID | Canis | IL-1β | 4 | GCTGAAGAAGCCCT | AGG |
| NO: 96 | familiaris | | | GCCCAC | |
| SEQ ID | Canis | IL-1β | 4 | CATCCTCCTGGAGG | GGG |
| NO: 97 | familiaris | | | ACCTGT | |
| SEQ ID | Canis | IL-1β | 4 | TCATCCTCCTGGAG | TGG |
| NO: 98 | familiaris | | | GACCTG | |
| SEQ ID | Canis | IL-1β | 4 | GCCCTGCCCACAGG | AGG |
| NO: 99 | familiaris | | | TCCTCC | |
| SEQ ID | Canis | IL-1β | 4 | CTGCCCACAGGTCC | AGG |
| NO: 100 | familiaris | | | TCCAGG | |
| SEQ ID | Canis | IL-1β | 4 | TCTTCAGGTCATCC | AGG |
| NO: 101 | familiaris | | | TCCTGG | |
| SEQ ID | Canis | IL-1β | 4 | TGCTCTTCAGGTCA | TGG |
| NO: 102 | familiaris | | | TCCTCC | |
| SEQ ID | Canis | IL-1β | 4 | TGTAGCAAAAGATG | AGG |
| NO: 103 | familiaris | | | CTCTTC | |
| SEQ ID | Canis | IL-1β | 4 | TTTTGCTACATCTT | AGG |
| NO: 104 | familiaris | | | TGAAGA | |
| SEQ ID | Equus | IL-1α | 4 | GTCATAGCTTGCAT | AGG |
| NO: 105 | caballus | | | CATAGA | |
| SEQ ID | Equus | IL-1α | 4 | CCATGCAGTCCTCA | GGG |
| NO: 106 | caballus | | | GGAAGT | |
| SEQ ID | Equus | IL-1α | 4 | TCCATGCAGTCCTC | TGG |
| NO: 107 | caballus | | | AGGAAG | |
| SEQ ID | Equus | IL-1α | 4 | AAGCTATGACCCAC | AGG |
| NO: 108 | caballus | | | TTCCTG | |
| SEQ ID | Equus | IL-1α | 4 | AATGTATCCATGCA | AGG |
| NO: 109 | caballus | | | GTCCTC | |
| SEQ ID | Equus | IL-1α | 4 | CCCACTTCCTGAGG | TGG |
| NO: 110 | caballus | | | ACTGCA | |
| SEQ ID | Equus | IL-1α | 4 | GGATGTCTTAGAGG | AGG |
| NO: 111 | caballus | | | TTTCAG | |
| SEQ ID | Equus | IL-1α | 4 | GTTCAGCTTGGATG | AGG |
| NO: 112 | caballus | | | TCTTAG | |
| SEQ ID | Equus | IL-1α | 4 | GCTCTCCTTGAAGT | TGG |
| NO: 113 | caballus | | | TCAGCT | |
| SEQ ID | Equus | IL-1α | 4 | GACATCCAAGCTGA | AGG |
| NO: 114 | caballus | | | ACTTCA | |
| SEQ ID | Equus | IL-1α | 4 | GCTGAACTTCAAGG | TGG |
| NO: 115 | caballus | | | AGAGCG | |
| SEQ ID | Equus | IL-1α | 4 | CTTCAAGGAGAGCG | TGG |
| NO: 116 | caballus | | | TGGTGC | |
| SEQ ID | Equus | IL-1α | 4 | CAAGGAGAGCGTGG | TGG |
| NO: 117 | caballus | | | TGCTGG | |
| SEQ ID | Equus | IL-1α | 4 | GTGGTGCTGGTGGC | CGG |
| NO: 118 | caballus | | | AGCCAA | |
| SEQ ID | Equus | IL-1α | 4 | TGGTGCTGGTGGCA | GGG |
| NO: 119 | caballus | | | GCCAAC | |
| SEQ ID | Equus | IL-1α | 4 | CTTCTTCAGAGTCT | TGG |
| NO: 120 | caballus | | | TCCCGT | |
| SEQ ID | Equus | IL-1α | 4 | GGAAGACTCTGAAG | CGG |
| NO: 121 | caballus | | | AAGAGA | |
| SEQ ID | Equus | IL-1α | 4 | AATGGCTTCCAGGT | TGG |
| NO: 122 | caballus | | | CATCAT | |
| SEQ ID | Equus | IL-1α | 4 | GTTCATCACCAATG | TGG |
| NO: 123 | caballus | | | ATGACC | |
| SEQ ID | Equus | IL-1α | 4 | TTCTTCTGGATCAT | TGG |
| NO: 124 | caballus | | | TGGCAA | |
| SEQ ID | Equus | IL-1β | 4 | GGTGGTGGGAGATT | TGG |
| NO: 125 | caballus | | | TGCAAC | |
| SEQ ID | Equus | IL-1β | 4 | AGTCTTGTTGTAGA | GGG |
| NO: 126 | caballus | | | GGTGGT | |
| SEQ ID | Equus | IL-1β | 4 | AAGTCTTGTTGTAG | TGG |
| NO: 127 | caballus | | | AGGTGG | |
| SEQ ID | Equus | IL-1β | 4 | TGAAAGTCTTGTTG | TGG |
| NO: 128 | caballus | | | TAGAGG | |
| SEQ ID | Equus | IL-1β | 4 | GTTTGAAAGTCTTG | AGG |
| NO: 129 | caballus | | | TTGTAG | |
| SEQ ID | Equus | IL-1β | 4 | ACATGCCATGTCAA | TGG |
| NO: 130 | caballus | | | TCATTG | |
| SEQ ID | Equus | IL-1β | 4 | CATGTCAATCATTG | TGG |
| NO: 131 | caballus | | | TGGCTG | |
| SEQ ID | Mus | IL-1α | 4 | GCCATAGCTTGCAT | AGG |
| NO: 132 | musculus | | | CATAGA | |
| SEQ ID | Mus | IL-1α | 4 | TCCTTCTATGATGC | TGG |
| NO: 133 | musculus | | | AAGCTA | |
| SEQ ID | Mus | IL-1α | 4 | GGACATCTTTGACG | AGG |
| NO: 134 | musculus | | | TTTCAG | |
| SEQ ID | Mus | IL-1α | 4 | GATGTCCAACTTCA | AGG |
| NO: 135 | musculus | | | CCTTCA | |
| SEQ ID | Mus | IL-1α | 4 | TGTCACCCGGCTCT | AGG |
| NO: 136 | musculus | | | CCTTGA | |
| SEQ ID | Mus | IL-1α | 4 | CTTCACCTTCAAGG | GGG |
| NO: 137 | musculus | | | AGAGCC | |
| SEQ ID | Mus | IL-1α | 4 | ACGTTGCTGATACT | CGG |
| NO: 138 | musculus | | | GTCACC | |
| SEQ ID | Mus | IL-1α | 4 | GTATCAGCAACGTC | CGG |
| NO: 139 | musculus | | | AAGCAA | |
| SEQ ID | Mus | IL-1α | 4 | TATCAGCAACGTCA | GGG |
| NO: 140 | musculus | | | AGCAAC | |
| SEQ ID | Mus | IL-1α | 4 | GGAAGATTCTGAAG | CGG |
| NO: 141 | musculus | | | AAGAGA | |
| SEQ ID | Mus | IL-1α | 4 | CTGCAGGTCATCTT | AGG |
| NO: 142 | musculus | | | CAGTGA | |
| SEQ ID | Mus | IL-1α | 4 | ACCTTCCAGATCAT | TGG |
| NO: 143 | musculus | | | GGGTTA | |
| SEQ ID | Mus | IL-1α | 4 | CTCCTTACCTTCCA | GGG |
| NO: 144 | musculus | | | GATCAT | |
| SEQ ID | Mus | IL-1α | 4 | TCCATAACCCATGA | AGG |
| NO: 145 | musculus | | | TCTGGA | |
| SEQ ID | Mus | IL-1α | 4 | AACCCATGATCTGG | AGG |
| NO: 146 | musculus | | | AAGGTA | |
| SEQ ID | Mus | IL-1β | 4 | GACAGCCCAGGTCA | TGG |
| NO: 147 | musculus | | | AAGGTT | |
| SEQ ID | Mus | IL-1β | 4 | ATCAGGACAGCCCA | AGG |
| NO: 148 | musculus | | | GGTCAA | |
| SEQ ID | Mus | IL-1β | 4 | TGCTTCCAAACCTT | GGG |
| NO: 149 | musculus | | | TGACCT | |
| SEQ ID | Mus | IL-1β | 4 | TGCTCTCATCAGGA | AGG |
| NO: 150 | musculus | | | CAGCCC | |
| SEQ ID | Mus | IL-1β | 4 | TGAAGCTGGATGCT | AGG |
| NO: 151 | musculus | | | CTCATC | |
| SEQ ID | Mus | IL-1β | 4 | GCTGCTGCGAGATT | TGG |
| NO: 152 | musculus | | | TGAAGC | |
| SEQ ID | Mus | IL-1β | 4 | CATCAACAAGAGCT | AGG |
| NO: 153 | musculus | | | TCAGGC | |
| SEQ ID | Mus | IL-1β | 4 | GCAGGCAGTATCAC | TGG |
| NO: 154 | musculus | | | TCATTG | |
| SEQ ID | Mus | IL-1β | 4 | AGTATCACTCATTG | TGG |
| NO: 155 | musculus | | | TGGCTG | |
| SEQ ID | Mus | IL-1β | 4 | TTGTGGCTGTGGAG | TGG |
| NO: 156 | musculus | | | AAGCTG | |
| SEQ ID | Mus | IL-1β | 4 | AAGGTCCACGGGAA | AGG |
| NO: 157 | musculus | | | AGACAC | |
| SEQ ID | Mus | IL-1β | 4 | AGCTACCTGTGTCT | TGG |
| NO: 158 | musculus | | | TTCCCG | |
| SEQ ID | Mus | IL-1β | 4 | CCTCATCCTGGAAG | GGG |
| NO: 159 | musculus | | | GTCCAC | |
| SEQ ID | Mus | IL-1β | 4 | TCCTCATCCTGGAA | CGG |
| NO: 160 | musculus | | | GGTCCA | |
| SEQ ID | Mus | IL-1β | 4 | GCTCATGTCCTCAT | AGG |
| NO: 161 | musculus | | | CCTGGA | |
| SEQ ID | Mus | IL-1β | 4 | CCCGTGGACCTTCC | AGG |
| NO: 162 | musculus | | | AGGATG | |
| SEQ ID | Mus | IL-1β | 4 | AGGTGCTCATGTCC | TGG |
| NO: 163 | musculus | | | TCATCC | |
| SEQ ID | Mus | IL-1β | 4 | TTCAAAGATGAAGG | AGG |
| NO: 164 | musculus | | | AAAAGA | |
| SEQ ID | Mus | IL-1β | 4 | AGTACCTTCTTCAA | AGG |
| NO: 165 | musculus | | | AGATGA | |
| SEQ ID | Mus | IL-1β | 4 | TTTTCCTTCATCTT | AGG |
| NO: 167 | musculus | | | TGAAGA | |

TABLE 13
Exemplary CRISPR Guide RNAs

| Identi- | | | | Target | |
|---|---|---|---|---|---|
| fier | Genome | Gene | Exon | Sequence 5′-3′ | PAM |
| SEQ ID | Homo | IL-1α | 4 | GCCAUAGCUUACAUGAU | AGG |
| NO: 168 | sapiens | | | AGA | |
| SEQ ID | Homo | IL-1α | 4 | UCCUUCUAUCAUGUAAG | UGG |
| NO: 169 | sapiens | | | CUA | |
| SEQ ID | Homo | IL-1α | 4 | CCAUGCAGCCUUCAUGG | GGG |
| NO: 170 | sapiens | | | AGU | |
| SEQ ID | Homo | IL-1α | 4 | UCCAUGCAGCCUUCAUG | UGG |
| NO: 171 | sapiens | | | GAG | |
| SEQ ID | Homo | IL-1α | 4 | AGCUAUGGCCCACUCCA | AGG |
| NO: 172 | sapiens | | | UGA | |
| SEQ ID | Homo | IL-1α | 4 | AUUGAUCCAUGCAGCCU | UGG |
| NO: 173 | sapiens | | | UCA | |
| SEQ ID | Homo | IL-1α | 4 | CCCACUCCAUGAAGGCU | UGG |
| NO: 174 | sapiens | | | GCA | |
| SEQ ID | Homo | IL-1α | 4 | GCUCUCCUUGAAGGUAA | UGG |
| NO: 175 | sapiens | | | GCU | |
| SEQ ID | Homo | IL-1α | 4 | UACCACCAUGCUCUCCU | AGG |
| NO: 176 | sapiens | | | UGA | |
| SEQ ID | Homo | IL-1α | 4 | GCUUACCUUCAAGGAGA | UGG |
| NO: 177 | sapiens | | | GCA | |
| SEQ ID | Homo | IL-1α | 4 | UACCUUCAAGGAGAGCA | UGG |
| NO: 178 | sapiens | | | UGG | |
| SEQ ID | Homo | IL-1α | 4 | AUGGUGGUAGUAGCAAC | CGG |
| NO: 179 | sapiens | | | CAA | |
| SEQ ID | Homo | IL-1α | 4 | UGGUGGUAGUAGCAACC | GGG |
| NO: 180 | sapiens | | | AAC | |
| SEQ ID | Homo | IL-1α | 4 | CUUCUUCAGAACCUUCC | UGG |
| NO: 181 | sapiens | | | CGU | |
| SEQ ID | Homo | IL-1α | 4 | GGUAGUAGCAACCAACG | AGG |
| NO: 182 | sapiens | | | GGA | |
| SEQ ID | Homo | IL-1α | 4 | GGAAGGUUCUGAAGAAG | CGG |
| NO: 183 | sapiens | | | AGA | |
| SEQ ID | Homo | IL-1α | 4 | CUCCAGGUCAUCAUCAG | UGG |
| NO: 184 | sapiens | | | UGA | |
| SEQ ID | Homo | IL-1α | 4 | CAUCACUGAUGAUGACC | AGG |
| NO: 185 | sapiens | | | UGG | |
| SEQ ID | Homo | IL-1α | 4 | AGUCAUUGGCGAUGGCC | AGG |
| NO: 186 | sapiens | | | UCC | |
| SEQ ID | Homo | IL-1α | 4 | UUCCUCUGAGUCAUUGG | UGG |
| NO: 187 | sapiens | | | CGA | |
| SEQ ID | Homo | IL-1β | 4 | UCCCAUGUGUCGAAGAA | AGG |
| NO: 188 | sapiens | | | GAU | |
| SEQ ID | Homo | IL-1β | 4 | AACCUAUCUUCUUCGAC | UGG |
| NO: 189 | sapiens | | | ACA | |
| SEQ ID | Homo | IL-1β | 4 | ACCUAUCUUCUUCGACA | GGG |
| NO: 190 | sapiens | | | CAU | |
| SEQ ID | Homo | IL-1β | 4 | CUUCGACACAUGGGAUA | AGG |
| NO: 191 | sapiens | | | ACG | |
| SEQ ID | Homo | IL-1β | 4 | GUGCAGUUCAGUGAUCG | AGG |
| NO: 192 | sapiens | | | UAC | |
| SEQ ID | Homo | IL-1β | 4 | GAUCACUGAACUGCACG | CGG |
| NO: 193 | sapiens | | | CUC | |
| SEQ ID | Homo | IL-1β | 4 | AUCACUGAACUGCACGC | GGG |
| NO: 194 | sapiens | | | UCC | |
| SEQ ID | Homo | IL-1β | 4 | CAAAAAAGCUUGGUGAU | UGG |
| NO: 195 | sapiens | | | GUC | |
| SEQ ID | Homo | IL-1β | 4 | CCAUAUCCUGUCCCUGG | UGG |
| NO: 196 | sapiens | | | AGG | |
| SEQ ID | Homo | IL-1β | 4 | CUGAAAGCUCUCCACCU | GGG |
| NO: 197 | sapiens | | | CCA | |
| SEQ ID | Homo | IL-1β | 4 | GCUCCAUAUCCUGUCCC | AGG |
| NO: 198 | sapiens | | | UGG | |
| SEQ ID | Homo | IL-1β | 4 | AGCUCUCCACCUCCAGG | AGG |
| NO: 199 | sapiens | | | GAC | |
| SEQ ID | Homo | IL-1β | 4 | GUUGCUCCAUAUCCUGU | UGG |
| NO: 200 | sapiens | | | CCC | |
| SEQ ID | Homo | IL-1β | 4 | GGACAGGAUAUGGAGCA | AGG |
| NO: 201 | sapiens | | | ACA | |
| SEQ ID | Canis | IL-1α | 3 | GUCACAGCUCAUAUCAU | AGG |
| NO: 202 | familiaris | | | AGA | |
| SEQ ID | Canis | IL-1α | 3 | ACAUGCAGUCCUCAUGA | GGG |
| NO: 203 | familiaris | | | AGU | |
| SEQ ID | Canis | IL-1α | 3 | GACAUGCAGUCCUCAUG | UGG |
| NO: 204 | familiaris | | | AAG | |
| SEQ ID | Canis | IL-1α | 3 | GAGCUGUGACCCACUUC | AGG |
| NO: 205 | familiaris | | | AUG | |
| SEQ ID | Canis | IL-1α | 3 | GGAUGUCUUUGAGAUUU | AGG |
| NO: 206 | familiaris | | | CAG | |
| SEQ ID | Canis | IL-1α | 3 | AUUUUCCUUGAAGGUAA | GGG |
| NO: 207 | familiaris | | | GCU | |
| SEQ ID | Canis | IL-1α | 3 | GACAUCCCAGCUUACCU | AGG |
| NO: 208 | familiaris | | | UCA | |
| SEQ ID | Canis | IL-1α | 3 | CUUCAAGGAAAAUGUGG | UGG |
| NO: 209 | familiaris | | | UAG | |
| SEQ ID | Canis | IL-1α | 3 | GUGGUAGUGGUGGCAGC | UGG |
| NO: 210 | familiaris | | | CAA | |
| SEQ ID | Canis | IL-1α | 3 | UGGUAGUGGUGGCAGCC | GGG |
| NO: 211 | familiaris | | | AAU | |
| SEQ ID | Canis | IL-1α | 3 | CUUCUUUAGAAUCUUCC | UGG |
| NO: 212 | familiaris | | | CAU | |
| SEQ ID | Canis | IL-1α | 3 | GGAAGAUUCUAAAGAAG | CGG |
| NO: 213 | familiaris | | | AGA | |
| SEQ ID | Canis | IL-1α | 3 | AAUGUCUUCCAGGUCAU | CGG |
| NO: 214 | familiaris | | | CAU | |
| SEQ ID | Canis | IL-1α | 3 | AUUCAUCACCGAUGAUG | UGG |
| NO: 215 | familiaris | | | ACC | |
| SEQ ID | Canis | IL-1α | 3 | AUUGCCAAUGACACAGA | AGG |
| NO: 216 | familiaris | | | AGA | |
| SEQ ID | Canis | IL-1β | 4 | CCUCAUCUACCAGAGAA | UGG |
| NO: 217 | familiaris | | | CUG | |
| SEQ ID | Canis | IL-1β | 4 | CCACAGUUCUCUGGUAG | AGG |
| NO: 218 | familiaris | | | AUG | |
| SEQ ID | Canis | IL-1β | 4 | CACAGUUCUCUGGUAGA | GGG |
| NO: 219 | familiaris | | | UGA | |
| SEQ ID | Canis | IL-1β | 4 | GCUGGUGGGAGACUUGC | UGG |
| NO: 220 | familiaris | | | AAC | |
| SEQ ID | Canis | IL-1β | 4 | ACUCUUGUUACAGAGCU | GGG |
| NO: 221 | familiaris | | | GGU | |
| SEQ ID | Canis | IL-1β | 4 | GACUCUUGUUACAGAGC | UGG |
| NO: 222 | familiaris | | | UGG | |
| SEQ ID | Canis | IL-1β | 4 | UCAGACUCUUGUUACAG | UGG |
| NO: 223 | familiaris | | | AGC | |
| SEQ ID | Canis | IL-1β | 4 | AGCUCUGUAACAAGAGU | AGG |
| NO: 224 | familiaris | | | CUG | |
| SEQ ID | Canis | IL-1β | 4 | CGUGUCAGUCAUUGUAG | UGG |
| NO: 225 | familiaris | | | CUU | |
| SEQ ID | Canis | IL-1β | 4 | UCCUGGAGGACCUGUGG | GGG |
| NO: 226 | familiaris | | | GCA | |
| SEQ ID | Canis | IL-1β | 4 | GCUGAAGAAGCCCUGCC | AGG |
| NO: 227 | familiaris | | | CAC | |
| SEQ ID | Canis | IL-1β | 4 | CAUCCUCCUGGAGGACC | GGG |
| NO: 228 | familiaris | | | UGU | |
| SEQ ID | Canis | IL-1β | 4 | UCAUCCUCCUGGAGGAC | UGG |
| NO: 229 | familiaris | | | CUG | |
| SEQ ID | Canis | IL-1β | 4 | GCCCUGCCCACAGGUCC | AGG |
| NO: 230 | familiaris | | | UCC | |
| SEQ ID | Canis | IL-1β | 4 | CUGCCCACAGGUCCUCC | AGG |
| NO: 231 | familiaris | | | AGG | |
| SEQ ID | Canis | IL-1β | 4 | UCUUCAGGUCAUCCUCC | AGG |
| NO: 232 | familiaris | | | UGG | |
| SEQ ID | Canis | IL-1β | 4 | UGCUCUUCAGGUCAUCC | UGG |
| NO: 233 | familiaris | | | UCC | |
| SEQ ID | Canis | IL-1β | 4 | UGUAGCAAAAGAUGCUC | AGG |
| NO: 234 | familiaris | | | UUC | |
| SEQ ID | Canis | IL-1β | 4 | UUUUGCUACAUCUUUGA | AGG |
| NO: 235 | familiaris | | | AGA | |
| SEQ ID | Equus | IL-1α | 4 | GUCAUAGCUUGCAUCAU | AGG |
| NO: 236 | caballus | | | AGA | |
| SEQ ID | Equus | IL-1α | 4 | CCAUGCAGUCCUCAGGA | GGG |
| NO: 237 | caballus | | | AGU | |
| SEQ ID | Equus | IL-1α | 4 | UCCAUGCAGUCCUCAGG | UGG |
| NO: 238 | caballus | | | AAG | |
| SEQ ID | Equus | IL-1α | 4 | AAGCUAUGACCCACUUC | AGG |
| NO: 239 | caballus | | | CUG | |
| SEQ ID | Equus | IL-1α | 4 | AAUGUAUCCAUGCAGUC | AGG |
| NO: 240 | caballus | | | CUC | |
| SEQ ID | Equus | IL-1α | 4 | CCCACUUCCUGAGGACU | UGG |
| NO: 241 | caballus | | | GCA | |
| SEQ ID | Equus | IL-1α | 4 | GGAUGUCUUAGAGGUUU | AGG |
| NO: 242 | caballus | | | CAG | |
| SEQ ID | Equus | IL-1α | 4 | GUUCAGCUUGGAUGUCU | AGG |
| NO: 243 | caballus | | | UAG | |
| SEQ ID | Equus | IL-1α | 4 | GCUCUCCUUGAAGUUCA | UGG |
| NO: 244 | caballus | | | GCU | |
| SEQ ID | Equus | IL-1α | 4 | GACAUCCAAGCUGAACU | AGG |
| NO: 245 | caballus | | | UCA | |
| SEQ ID | Equus | IL-1α | 4 | GCUGAACUUCAAGGAGA | UGG |
| NO: 246 | caballus | | | GCG | |
| SEQ ID | Equus | IL-1α | 4 | CUUCAAGGAGAGCGUGG | UGG |
| NO: 247 | caballus | | | UGC | |
| SEQ ID | Equus | IL-1α | 4 | CAAGGAGAGCGUGGUGC | UGG |
| NO: 248 | caballus | | | UGG | |
| SEQ ID | Equus | IL-1α | 4 | GUGGUGCUGGUGGCAGC | CGG |
| NO: 249 | caballus | | | CAA | |
| SEQ ID | Equus | IL-1α | 4 | UGGUGCUGGUGGCAGCC | GGG |
| NO: 250 | caballus | | | AAC | |
| SEQ ID | Equus | IL-1α | 4 | CUUCUUCAGAGUCUUCC | UGG |
| NO: 251 | caballus | | | CGU | |
| SEQ ID | Equus | IL-1α | 4 | GGAAGACUCUGAAGAAG | CGG |
| NO: 252 | caballus | | | AGA | |
| SEQ ID | Equus | IL-1α | 4 | AAUGGCUUCCAGGUCAU | UGG |
| NO: 253 | caballus | | | CAU | |
| SEQ ID | Equus | IL-1α | 4 | GUUCAUCACCAAUGAUG | UGG |
| NO: 254 | caballus | | | ACC | |
| SEQ ID | Equus | IL-1α | 4 | UUCUUCUGGAUCAUUGG | UGG |
| NO: 255 | caballus | | | CAA | |
| SEQ ID | Equus | IL-1β | 4 | GGUGGUGGGAGAUUUGC | UGG |
| NO: 256 | caballus | | | AAC | |
| SEQ ID | Equus | IL-1β | 4 | AGUCUUGUUGUAGAGGU | GGG |
| NO: 257 | caballus | | | GGU | |
| SEQ ID | Equus | IL-1β | 4 | AAGUCUUGUUGUAGAGG | UGG |
| NO: 258 | caballus | | | UGG | |
| SEQ ID | Equus | IL-1β | 4 | UGAAAGUCUUGUUGUAG | UGG |
| NO: 259 | caballus | | | AGG | |
| SEQ ID | Equus | IL-1β | 4 | GUUUGAAAGUCUUGUUG | AGG |
| NO: 260 | caballus | | | UAG | |
| SEQ ID | Equus | IL-1β | 4 | ACAUGCCAUGUCAAUCA | UGG |
| NO: 261 | caballus | | | UUG | |
| SEQ ID | Equus | IL-1β | 4 | CAUGUCAAUCAUUGUGG | UGG |
| NO: 262 | caballus | | | CUG | |
| SEQ ID | Mus | IL-1α | 4 | GCCAUAGCUUGCAUCAU | AGG |
| NO: 263 | musculus | | | AGA | |
| SEQ ID | Mus | IL-1α | 4 | UCCUUCUAUGAUGCAAG | UGG |
| NO: 264 | musculus | | | CUA | |
| SEQ ID | Mus | IL-1α | 4 | GGACAUCUUUGACGUUU | AGG |
| NO: 265 | musculus | | | CAG | |
| SEQ ID | Mus | IL-1α | 4 | GAUGUCCAACUUCACCU | AGG |
| NO: 266 | musculus | | | UCA | |
| SEQ ID | Mus | IL-1α | 4 | UGUCACCCGGCUCUCCU | AGG |
| NO: 267 | musculus | | | UGA | |
| SEQ ID | Mus | IL-1α | 4 | CUUCACCUUCAAGGAGA | GGG |
| NO: 268 | musculus | | | GCC | |
| SEQ ID | Mus | IL-1α | 4 | ACGUUGCUGAUACUGUC | CGG |
| NO: 269 | musculus | | | ACC | |
| SEQ ID | Mus | IL-1α | 4 | GUAUCAGCAACGUCAAG | CGG |
| NO: 270 | musculus | | | CAA | |
| SEQ ID | Mus | IL-1α | 4 | UAUCAGCAACGUCAAGC | GGG |
| NO: 271 | musculus | | | AAC | |
| SEQ ID | Mus | IL-1α | 4 | GGAAGAUUCUGAAGAAG | CGG |
| NO: 272 | musculus | | | AGA | |
| SEQ ID | Mus | IL-1α | 4 | CUGCAGGUCAUCUUCAG | AGG |
| NO: 273 | musculus | | | UGA | |
| SEQ ID | Mus | IL-1α | 4 | ACCUUCCAGAUCAUGGG | UGG |
| NO: 274 | musculus | | | UUA | |
| SEQ ID | Mus | IL-1α | 4 | CUCCUUACCUUCCAGAU | GGG |
| NO: 275 | musculus | | | CAU | |
| SEQ ID | Mus | IL-1α | 4 | UCCAUAACCCAUGAUCU | AGG |
| NO: 276 | musculus | | | GGA | |
| SEQ ID | Mus | IL-1α | 4 | AACCCAUGAUCUGGAAG | AGG |
| NO: 277 | musculus | | | GUA | |
| SEQ ID | Mus | IL-1β | 4 | GACAGCCCAGGUCAAAG | UGG |
| NO: 278 | musculus | | | GUU | |
| SEQ ID | Mus | IL-1β | 4 | AUCAGGACAGCCCAGGU | AGG |
| NO: 279 | musculus | | | CAA | |
| SEQ ID | Mus | IL-1β | 4 | UGCUUCCAAACCUUUGA | GGG |
| NO: 280 | musculus | | | CCU | |
| SEQ ID | Mus | IL-1β | 4 | UGCUCUCAUCAGGACAG | AGG |
| NO: 281 | musculus | | | CCC | |
| SEQ ID | Mus | IL-1β | 4 | UGAAGCUGGAUGCUCUC | AGG |
| NO: 282 | musculus | | | AUC | |
| SEQ ID | Mus | IL-1β | 4 | GCUGCUGCGAGAUUUGA | UGG |
| NO: 283 | musculus | | | AGC | |
| SEQ ID | Mus | IL-1β | 4 | CAUCAACAAGAGCUUCA | AGG |
| NO: 284 | musculus | | | GGC | |
| SEQ ID | Mus | IL-1β | 4 | GCAGGCAGUAUCACUCA | UGG |
| NO: 285 | musculus | | | UUG | |
| SEQ ID | Mus | IL-1β | 4 | AGUAUCACUCAUUGUGG | UGG |
| NO: 286 | musculus | | | CUG | |
| SEQ ID | Mus | IL-1β | 4 | UUGUGGCUGUGGAGAAG | UGG |
| NO: 287 | musculus | | | CUG | |
| SEQ ID | Mus | IL-1β | 4 | AAGGUCCACGGGAAAGA | AGG |
| NO: 288 | musculus | | | CAC | |
| SEQ ID | Mus | IL-1β | 4 | AGCUACCUGUGUCUUUC | UGG |
| NO: 289 | musculus | | | CCG | |
| SEQ ID | Mus | IL-1β | 4 | CCUCAUCCUGGAAGGUC | GGG |
| NO: 290 | musculus | | | CAC | |
| SEQ ID | Mus | IL-1β | 4 | UCCUCAUCCUGGAAGGU | CGG |
| NO: 291 | musculus | | | CCA | |
| SEQ ID | Mus | IL-1β | 4 | GCUCAUGUCCUCAUCCU | AGG |
| NO: 292 | musculus | | | GGA | |
| SEQ ID | Mus | IL-1β | 4 | CCCGUGGACCUUCCAGG | AGG |
| NO: 293 | musculus | | | AUG | |
| SEQ ID | Mus | IL-1β | 4 | AGGUGCUCAUGUCCUCA | UGG |
| NO: 294 | musculus | | | UCC | |
| SEQ ID | Mus | IL-1β | 4 | UUCAAAGAUGAAGGAAA | AGG |
| NO: 295 | musculus | | | AGA | |
| SEQ ID | Mus | IL-1β | 4 | AGUACCUUCUUCAAAGA | AGG |
| NO: 296 | musculus | | | UGA | |
| SEQ ID | Mus | IL-1β | 4 | UUUUCCUUCAUCUUUGA | AGG |
| NO: 297 | musculus | | | AGA | |

[0117] In certain embodiments, the sequence of a guide RNA (e.g., a single guide RNA or sgRNA) may be modified to increase editing efficiency and/or reduce off-target effects. In certain embodiments, the sequence of a guide RNA may vary from the target sequence by about 1 base, about 2 bases, about 3 bases, about 4 bases, about 5 bases, about 5 bases, about 6 bases, about 7 bases, about 8 bases, about 9 bases, about 10 bases, about 15 bases, or greater than about 15 bases. In certain embodiments, the sequence of a guide RNA may vary from the target sequence by about 1%, about 2%, about 3%, about 4%, about 5%, about 6%, about 7%, about 8%, about 9%, about 10%, about 11%, about 12%, about 13%, about 14%, about 15%, about 16%, about 17%, about 18%, about 19%, about 20%, or greater than about 20%. As used herein, variation form a target sequence may refer to the degree of complementarity.

[0118] In certain embodiments, a guide RNA used with a composition, method or system of the present disclosure is identical to a sequence as shown in any one of SEQ ID NO.: 21-34 and SEQ ID NO.: 168-297. In certain embodiments, a guide RNA used with a composition, method or system of the present disclosure is at least about 95% identical to a sequence as shown in any one of SEQ ID NO.: 21-34 and SEQ ID NO.: 168-297. In certain embodiments, a guide RNA used with a composition, method or system of the present disclosure is at least about 90% identical to a sequence as shown in any one of SEQ ID NO.: 21-34 and SEQ ID NO.: 168-297. In certain embodiments, a guide RNA used with a composition, method or system of the present disclosure is at least about 85% identical to a sequence as shown in any one of SEQ ID NO.: 21-34 and SEQ ID NO.: 168-297. In certain embodiments, a guide RNA used with a composition, method or system of the present disclosure is at least about 80% identical to a sequence as shown in any one of SEQ ID NO.: 21-34 and SEQ ID NO.: 168-297. In certain embodiments, a guide RNA used with a composition, method or system of the present disclosure is at least about 75% identical to a sequence as shown in any one of SEQ ID NO.: 21-34 and SEQ ID NO.: 168-297. In certain embodiments, a guide RNA used with a composition, method or system of the present disclosure is at least about 70% identical to a sequence as shown in any one of SEQ ID NO.: 21-34 and SEQ ID NO.: 168-297. In certain embodiments, a guide RNA used with a composition, method or system of the present disclosure is at least about 65% identical to a sequence as shown in any one of SEQ ID NO.: 21-34 and SEQ ID NO.: 168-297. In certain embodiments, a guide RNA used with a composition, method or system of the present disclosure is at least about 60% identical to a sequence as shown in any one of SEQ ID NO.: 21-34 and SEQ ID NO.: 168-297. In certain embodiments, a guide RNA used with a composition, method or system of the present disclosure is at least about 55% identical to a sequence as shown in any one of SEQ ID NO.: 21-34 and SEQ ID NO.: 168-297. In certain embodiments, a guide RNA used with a composition, method or system of the present disclosure is at least about 50% identical to a sequence as shown in any one of SEQ ID NO.: 21-34 and SEQ ID NO.: 168-297. In certain embodiments, a guide RNA used with a composition, method or system of the present disclosure is at least about 45% identical to a sequence as shown in any one of SEQ ID NO.: 21-34 and SEQ ID NO.: 168-297. In certain embodiments, a guide RNA used with a composition, method or system of the present disclosure is at least about 40% identical to a sequence as shown in any one of SEQ ID NO.: 21-34 and SEQ ID NO.: 168-297. In certain embodiments, a guide RNA used with a composition, method or system of the present disclosure is at least about 35% identical to a sequence as shown in any one of SEQ ID NO.: 21-34 and SEQ ID NO.: 168-297. In certain embodiments, a guide RNA used with a composition, method or system of the present disclosure is at least about 35% identical to a sequence as shown in any one of SEQ ID NO.: 21-34 and SEQ ID NO.: 168-297.

[0119] In certain embodiments, a guide RNA used with a composition, method or system of the present has 1 base substitution in a sequence as shown in any one of SEQ ID NO.: 21-34 and SEQ ID NO.: 168-297. In certain embodiments, a guide RNA used with a composition, method or system of the present has 2 base substitutions in a sequence as shown in any one of SEQ ID NO.: 21-34 and SEQ ID NO.: 168-297. In certain embodiments, a guide RNA used with a composition, method or system of the present has 3 base substitutions in a sequence as shown in any one of SEQ ID NO.: 21-34 and SEQ ID NO.: 168-297. In certain embodiments, a guide RNA used with a composition, method or system of the present has 4 base substitutions in a sequence as shown in any one of SEQ ID NO.: 21-34 and SEQ ID NO.: 168-297. In certain embodiments, a guide RNA used with a composition, method or system of the present has 4 base substitutions in a sequence as shown in any one of SEQ ID NO.: 21-34 and SEQ ID NO.: 168-297. In certain embodiments, a guide RNA used with a composition, method or system of the present has 6 base substitutions in a sequence as shown in any one of SEQ ID NO.: 21-34 and SEQ ID NO.: 168-297. In certain embodiments, a guide RNA used with a composition, method or system of the present has 7 base substitutions in a sequence as shown in any one of SEQ ID NO.: 21-34 and SEQ ID NO.: 168-297. In certain embodiments, a guide RNA used with a composition, method or system of the present has 8 base substitutions in a sequence as shown in any one of SEQ ID NO.: 21-34 and SEQ ID NO.: 168-297. In certain embodiments, a guide RNA used with a composition, method or system of the present has 9 base substitutions in a sequence as shown in any one of SEQ ID NO.: 21-34 and SEQ ID NO.: 168-297. In certain embodiments, a guide RNA used with a composition, method or system of the present has 10 base substitutions in a sequence as shown in any one of SEQ ID NO.: 21-34 and SEQ ID NO.: 168-297. In certain embodiments, a guide RNA used with a composition, method or system of the present has 11 base substitutions in a sequence as shown in any one of SEQ ID NO.: 21-34 and SEQ ID NO.: 168-297. In certain embodiments, a guide RNA used with a composition, method or system of the present has 12 base substitutions in a sequence as shown in any one of SEQ ID NO.: 21-34 and SEQ ID NO.: 168-297. In certain embodiments, a guide RNA used with a composition, method or system of the present has 13 base substitutions in a sequence as shown in any one of SEQ ID NO.: 21-34 and SEQ ID NO.: 168-297. In certain embodiments, a guide RNA used with a composition, method or system of the present has 14 base substitutions in a sequence as shown in any one of SEQ ID NO.: 21-34 and SEQ ID NO.: 168-297. In certain embodiments, a guide RNA used with a composition, method or system of the present has 15 base substitutions in a sequence as shown in any one of SEQ ID NO.: 21-34 and SEQ ID NO.: 168-297.

[0120] In certain embodiments, a guide RNA of the present disclosure is designed to and/or capable of knocking down an expression of a target gene as shown in any one of SEQ ID NO.: 7-20 and SEQ ID NO.: 37-167. In certain embodiments, a guide RNA of the present disclosure is designed to or capable of knocking down the human IL-1α gene by binding to at least a portion of Exon 1 of the human IL-1α gene. In certain embodiments, a guide RNA of the present disclosure is designed to or capable of knocking down the human IL-1α gene by binding to at least a portion of Exon 2 of the human IL-1α gene. In certain embodiments, a guide RNA of the present disclosure is designed to or capable of knocking down the human IL-1α gene by binding to at least a portion of Exon 3 of the human IL-1α gene. In certain embodiments, a guide RNA of the present disclosure is designed to or capable of knocking down the human IL-1α gene by binding to at least a portion of Exon 4 of the human IL-1α gene. In certain embodiments, a guide RNA of the present disclosure is designed to or capable of knocking down the human IL-1α gene by binding to at least a portion of Exon 5 of the human IL-1α gene. In certain embodiments, a guide RNA of the present disclosure is designed to or capable of knocking down the human IL-1α gene by binding to at least a portion of Exon 6 of the human IL-1α gene. In certain embodiments, a guide RNA of the present disclosure is designed to or capable of knocking down the human IL-1α gene by binding to at least a portion of Exon 7 of the human IL-1α gene. In certain embodiments, a guide RNA of the present disclosure is designed to or capable of knocking down the human IL-1α gene by binding to at least a portion of Exon 8 of the human IL-1α gene.

[0121] In certain embodiments, a guide RNA of the present disclosure is designed to or capable of knocking down the human IL-1β gene by binding to at least a portion of Exon 1 of the human IL-1β gene. In certain embodiments, a guide RNA of the present disclosure is designed to or capable of knocking down the human IL-1β gene by binding to at least a portion of Exon 2 of the human IL-1β gene. In certain embodiments, a guide RNA of the present disclosure is designed to or capable of knocking down the human IL-1β gene by binding to at least a portion of Exon 3 of the human IL-1β gene. In certain embodiments, a guide RNA of the present disclosure is designed to or capable of knocking down the human IL-1β gene by binding to at least a portion of Exon 4 of the human IL-1β gene. In certain embodiments, a guide RNA of the present disclosure is designed to or capable of knocking down the human IL-1β gene by binding to at least a portion of Exon 5 of the human IL-1β gene. In certain embodiments, a guide RNA of the present disclosure is designed to or capable of knocking down the human IL-1β gene by binding to at least a portion of Exon 6 of the human IL-1β gene. In certain embodiments, a guide RNA of the present disclosure is designed to or capable of knocking down the human IL-1β gene by binding to at least a portion of Exon 7 of the human IL-1β gene.

[0122] In certain embodiments, a guide RNA of the present disclosure is designed to and/or capable of knocking down an expression of a target gene as shown in any one of SEQ ID NO.: 7-20 and SEQ ID NO.: 37-167. In certain embodiments, a guide RNA of the present disclosure is designed to or capable of knocking down the Canis familiaris IL-1α gene by binding to at least a portion of Exon 1 of the Canis familiaris IL-1α gene. In certain embodiments, a guide RNA of the present disclosure is designed to or capable of knocking down the Canis familiaris IL-1α gene by binding to at least a portion of Exon 2 of the Canis familiaris IL-1α gene. In certain embodiments, a guide RNA of the present disclosure is designed to or capable of knocking down the Canis familiaris IL-1α gene by binding to at least a portion of Exon 3 of the Canis familiaris IL-1α gene. In certain embodiments, a guide RNA of the present disclosure is designed to or capable of knocking down the Canis familiaris IL-1α gene by binding to at least a portion of Exon 4 of the Canis familiaris IL-1α gene. In certain embodiments, a guide RNA of the present disclosure is designed to or capable of knocking down the Canis familiaris IL-1α gene by binding to at least a portion of Exon 5 of the Canis familiaris IL-1α gene. In certain embodiments, a guide RNA of the present disclosure is designed to or capable of knocking down the Canis familiaris IL-1α gene by binding to at least a portion of Exon 6 of the Canis familiaris IL-1α gene. In certain embodiments, a guide RNA of the present disclosure is designed to or capable of knocking down the Canis familiaris IL-1α gene by binding to at least a portion of Exon 7 of the Canis familiaris IL-1α gene.

[0123] In certain embodiments, a guide RNA of the present disclosure is designed to or capable of knocking down the Canis familiaris IL-1β gene by binding to at least a portion of Exon 1 of the Canis familiaris IL-1β gene. In certain embodiments, a guide RNA of the present disclosure is designed to or capable of knocking down the Canis familiaris IL-1β gene by binding to at least a portion of Exon 2 of the Canis familiaris IL-1β gene. In certain embodiments, a guide RNA of the present disclosure is designed to or capable of knocking down the Canis familiaris IL-1β gene by binding to at least a portion of Exon 3 of the Canis familiaris IL-1β gene. In certain embodiments, a guide RNA of the present disclosure is designed to or capable of knocking down the Canis familiaris IL-1β gene by binding to at least a portion of Exon 4 of the Canis familiaris IL-1β gene. In certain embodiments, a guide RNA of the present disclosure is designed to or capable of knocking down the Canis familiaris IL-1β gene by binding to at least a portion of Exon 5 of the Canis familiaris IL-1β gene. In certain embodiments, a guide RNA of the present disclosure is designed to or capable of knocking down the Canis familiaris IL-1β gene by binding to at least a portion of Exon 6 of the Canis familiaris IL-1β gene. In certain embodiments, a guide RNA of the present disclosure is designed to or capable of knocking down the Canis familiaris IL-1β gene by binding to at least a portion of Exon 7 of the Canis familiaris IL-1β gene. In certain embodiments, a guide RNA of the present disclosure is designed to or capable of knocking down the Canis familiaris IL-1β gene by binding to at least a portion of Exon 8 of the Canis familiaris IL-1β gene.

[0124] In certain embodiments, a guide RNA of the present disclosure is designed to and/or capable of knocking down an expression of a target gene as shown in any one of SEQ ID NO.: 7-20 and SEQ ID NO.: 37-167. In certain embodiments, a guide RNA of the present disclosure is designed to or capable of knocking down the equus caballus IL-1α gene by binding to at least a portion of Exon 1 of the equus caballus IL-1α gene. In certain embodiments, a guide RNA of the present disclosure is designed to or capable of knocking down the equus caballus IL-1α gene by binding to at least a portion of Exon 2 of the equus caballus IL-1α gene. In certain embodiments, a guide RNA of the present disclosure is designed to or capable of knocking down the equus caballus IL-1α gene by binding to at least a portion of Exon 3 of the equus caballus IL-1α gene. In certain embodiments, a guide RNA of the present disclosure is designed to or capable of knocking down the equus caballus IL-1α gene by binding to at least a portion of Exon 4 of the equus caballus IL-1α gene. In certain embodiments, a guide RNA of the present disclosure is designed to or capable of knocking down the equus caballus IL-1α gene by binding to at least a portion of Exon 5 of the equus caballus IL-1α gene. In certain embodiments, a guide RNA of the present disclosure is designed to or capable of knocking down the equus caballus IL-1α gene by binding to at least a portion of Exon 6 of the equus caballus IL-1α gene. In certain embodiments, a guide RNA of the present disclosure is designed to or capable of knocking down the equus caballus IL-1α gene by binding to at least a portion of Exon 7 of the equus caballus IL-1α gene.

[0125] In certain embodiments, a guide RNA of the present disclosure is designed to or capable of knocking down the equus caballus IL-1β gene by binding to at least a portion of Exon 1 of the equus caballus IL-1β gene. In certain embodiments, a guide RNA of the present disclosure is designed to or capable of knocking down the equus caballus IL-1β gene by binding to at least a portion of Exon 2 of the equus caballus IL-1β gene. In certain embodiments, a guide RNA of the present disclosure is designed to or capable of knocking down the equus caballus IL-1β gene by binding to at least a portion of Exon 3 of the equus caballus IL-1β gene. In certain embodiments, a guide RNA of the present disclosure is designed to or capable of knocking down the equus caballus IL-1β gene by binding to at least a portion of Exon 4 of the equus caballus IL-1β gene. In certain embodiments, a guide RNA of the present disclosure is designed to or capable of knocking down the equus caballus IL-1β gene by binding to at least a portion of Exon 5 of the equus caballus IL-1β gene. In certain embodiments, a guide RNA of the present disclosure is designed to or capable of knocking down the equus caballus IL-1β gene by binding to at least a portion of Exon 6 of the equus caballus IL-1β gene. In certain embodiments, a guide RNA of the present disclosure is designed to or capable of knocking down the equus caballus IL-1β gene by binding to at least a portion of Exon 7 of the equus caballus IL-1β gene.

[0126] In certain embodiments, a guide RNA of the present disclosure is designed to and/or capable of knocking down an expression of a target gene as shown in any one of SEQ ID NO.: 7-20 and SEQ ID NO.: 37-167. In certain embodiments, a guide RNA of the present disclosure is designed to or capable of knocking down the Mus musculus IL-1α gene by binding to at least a portion of Exon 1 of the Mus musculus IL-1α gene. In certain embodiments, a guide RNA of the present disclosure is designed to or capable of knocking down the Mus musculus IL-1α gene by binding to at least a portion of Exon 2 of the Mus musculus IL-1α gene. In certain embodiments, a guide RNA of the present disclosure is designed to or capable of knocking down the Mus musculus IL-1α gene by binding to at least a portion of Exon 3 of the Mus musculus IL-1α gene. In certain embodiments, a guide RNA of the present disclosure is designed to or capable of knocking down the Mus musculus IL-1α gene by binding to at least a portion of Exon 4 of the Mus musculus IL-1α gene. In certain embodiments, a guide RNA of the present disclosure is designed to or capable of knocking down the Mus musculus IL-1α gene by binding to at least a portion of Exon 5 of the Mus musculus IL-1α gene. In certain embodiments, a guide RNA of the present disclosure is designed to or capable of knocking down the Mus musculus IL-1α gene by binding to at least a portion of Exon 6 of the Mus musculus IL-1α gene. In certain embodiments, a guide RNA of the present disclosure is designed to or capable of knocking down the Mus musculus IL-1α gene by binding to at least a portion of Exon 7 of the Mus musculus IL-1α gene. In certain embodiments, a guide RNA of the present disclosure is designed to or capable of knocking down the Mus musculus IL-1α gene by binding to at least a portion of Exon 8 of the Mus musculus IL-1α gene.

[0127] In certain embodiments, a guide RNA of the present disclosure is designed to or capable of knocking down the Mus musculus IL-1β gene by binding to at least a portion of Exon 1 of the Mus musculus IL-1β gene. In certain embodiments, a guide RNA of the present disclosure is designed to or capable of knocking down the Mus musculus IL-1β gene by binding to at least a portion of Exon 2 of the Mus musculus IL-1β gene. In certain embodiments, a guide RNA of the present disclosure is designed to or capable of knocking down the Mus musculus IL-1β gene by binding to at least a portion of Exon 3 of the Mus musculus IL-1β gene. In certain embodiments, a guide RNA of the present disclosure is designed to or capable of knocking down the Mus musculus IL-1β gene by binding to at least a portion of Exon 4 of the Mus musculus IL-1β gene. In certain embodiments, a guide RNA of the present disclosure is designed to or capable of knocking down the Mus musculus IL-1β gene by binding to at least a portion of Exon 5 of the Mus musculus IL-1β gene. In certain embodiments, a guide RNA of the present disclosure is designed to or capable of knocking down the Mus musculus IL-1β gene by binding to at least a portion of Exon 6 of the Mus musculus IL-1β gene. In certain embodiments, a guide RNA of the present disclosure is designed to or capable of knocking down the Mus musculus IL-1β gene by binding to at least a portion of Exon 7 of the Mus musculus IL-1β gene.

[0128] In some instances, the sgRNA is introduced into a cell (e.g., an in vitro cell such as a primary cell for ex vivo therapy, or an in vivo cell such as in a patient) with a recombinant expression vector comprising a nucleotide sequence encoding a Cas nuclease (e.g., Cas9 polypeptide) or a variant or fragment thereof. In some embodiments, the sgRNA is complexed with a Cas nuclease (e.g., a Cas9 polypeptide) or a variant or fragment thereof to form a ribonucleoprotein (RNP)-based delivery system for introduction into a cell (e.g., an in vitro cell such as a primary cell for ex vivo therapy, or an in vivo cell such as in a patient). In other instances, the sgRNA is introduced into a cell (e.g., an in vitro cell such as a primary cell for ex vivo therapy, or an in vivo cell such as in a patient) with an mRNA encoding a Cas nuclease (e.g., Cas9 polypeptide) or a variant or fragment thereof.

[0129] Any heterologous or foreign nucleic acid (e.g., target locus-specific sgRNA and/or polynucleotide encoding a Cas9 polynucleotide) can be introduced into a cell using any method known to one skilled in the art. Such methods include, but are not limited to, electroporation, nucleofection, transfection, lipofection, transduction, microinjection, electroinjection, electrofusion, nanoparticle bombardment, transformation, conjugation, and the like.

[0130] The nucleic acid sequence of the sgRNA can be any polynucleotide sequence having sufficient complementarity with a target polynucleotide sequence (e.g., target DNA sequence) to hybridize with the target sequence and direct sequence-specific binding of a CRISPR complex to the target sequence. In some embodiments, the degree of complementarity between a guide sequence of the sgRNA and its corresponding target sequence, when optimally aligned using a suitable alignment algorithm, is about or more than about 50%, 60%, 75%, 80%, 85%, 90%, 95%, 97.5%, 99%, or more. Optimal alignment may be determined with the use of any suitable algorithm for aligning sequences, non-limiting example of which include the Smith-Waterman algorithm, the Needleman-Wunsch algorithm, algorithms based on the Burrows-Wheeler Transform (e.g. the Burrows Wheeler Aligner), ClustalW, Clustal X, BLAT, Novoalign (Novocraft Technologies, ELAND (Illumina, San Diego, Calif), SOAP (available at soap.genomics.org.cn), and Maq (available at maq.sourceforge.net). In some embodiments, a guide sequence is about 1 nucleotide, 2 nucleotides, 3 nucleotides, 4 nucleotides, 5 nucleotides, 6 nucleotides, 7 nucleotides, 8 nucleotides, 9 nucleotides, 10 nucleotides, 11 nucleotides, 12 nucleotides, 13 nucleotides, 14 nucleotides, 15 nucleotides, 16 nucleotides, 17 nucleotides, 18 nucleotides, 19 nucleotides, 20 nucleotides, 21 nucleotides, 22 nucleotides, 23 nucleotides, 24 nucleotides, 25 nucleotides, 26 nucleotides, 27 nucleotides, 28 nucleotides, 29 nucleotides, 30 nucleotides, 35 nucleotides, 40 nucleotides, 45 nucleotides, 50 nucleotides, 75 nucleotides, or more nucleotides in length. In some instances, a guide sequence is about 20 nucleotides in length. In other instances, a guide sequence is about 15 nucleotides in length. In other instances, a guide sequence is about 25 nucleotides in length. The ability of a guide sequence to direct sequence-specific binding of a CRISPR complex to a target sequence may be assessed by any suitable assay. For example, the components of a CRISPR system sufficient to form a CRISPR complex, including the guide sequence to be tested, may be provided to a host cell having the corresponding target sequence, such as by transfection with vectors encoding the components of the CRISPR sequence, followed by an assessment of preferential cleavage within the target sequence. Similarly, cleavage of a target polynucleotide sequence may be evaluated in a test tube by providing the target sequence, components of a CRISPR complex, including the guide sequence to be tested and a control guide sequence different from the test guide sequence, and comparing binding or rate of cleavage at the target sequence between the test and control guide sequence reactions.

[0131] The nucleic acid sequence of a sgRNA can be selected using any of the web-based software described above. Considerations for selecting a DNA-targeting RNA include the PAM sequence for the Cas nuclease (e.g., Cas9 polypeptide) to be used, and strategies for minimizing off-target modifications. Tools, such as the CRISPR Design Tool, can provide sequences for preparing the sgRNA, for assessing target modification efficiency, and/or assessing cleavage at off-target sites. Another consideration for selecting the sequence of a sgRNA includes reducing the degree of secondary structure within the guide sequence. Secondary structure may be determined by any suitable polynucleotide folding algorithm. Some programs are based on calculating the minimal Gibbs free energy. Examples of suitable algorithms include mFold (Zuker and Stiegler, Nucleic Acids Res, 9 (1981), 133-148), UNAFold package (Markham et al, Methods Mol Biol, 2008, 453:3-31) and RNAfold form the ViennaRNa Package.

[0132] The sgRNA can be about 10 to about 500 nucleotides, e.g., about 10 nucleotides, 15 nucleotides, 20 nucleotides, 25 nucleotides, 30 nucleotides, 35 nucleotides, 40 nucleotides, 45 nucleotides, 50 nucleotides, 55 nucleotides, 60 nucleotides, 65 nucleotides, 70 nucleotides, 75 nucleotides, 80 nucleotides, 85 nucleotides, 90 nucleotides, 95 nucleotides, 100 nucleotides, 105 nucleotides, 110 nucleotides, 120 nucleotides, 130 nucleotides, 140 nucleotides, 150 nucleotides, 160 nucleotides, 170 nucleotides, 180 nucleotides, 190 nucleotides, 200 nucleotides, 210 nucleotides, 220 nucleotides, 230 nucleotides, 240 nucleotides, 250 nucleotides, 260 nucleotides, 270 nucleotides, 280 nucleotides, 290 nucleotides, 300 nucleotides, 310 nucleotides, 320 nucleotides, 330 nucleotides, 340 nucleotides, 350 nucleotides, 360 nucleotides, 370 nucleotides, 380 nucleotides, 390 nucleotides, 400 nucleotides, 410 nucleotides, 420 nucleotides, 430 nucleotides, 440 nucleotides, 450 nucleotides, 460 nucleotides, 470 nucleotides, 480 nucleotides, 490 nucleotides, or about 500 nucleotides. In some embodiments, the sgRNA is about 20 to about 500 nucleotides, e.g., 20 nucleotides, 25 nucleotides, 30 nucleotides, 35 nucleotides, 40 nucleotides, 45 nucleotides, 50 nucleotides, 55 nucleotides, 60 nucleotides, 65 nucleotides, 70 nucleotides, 75 nucleotides, 80 nucleotides, 85 nucleotides, 90 nucleotides, 95 nucleotides, 100 nucleotides, 105 nucleotides 110 nucleotides, 115 nucleotides, 120 nucleotides, 125 nucleotides, 130 nucleotides, 135 nucleotides, 140 nucleotides, 145 nucleotides, 150 nucleotides, 155 nucleotides, 160 nucleotides, 165 nucleotides, 170 nucleotides, 175 nucleotides, 180 nucleotides, 185 nucleotides, 190 nucleotides, 195 nucleotides, 200 nucleotides, 205 nucleotides, 210 nucleotides, 215 nucleotides, 220 nucleotides, 225 nucleotides, 230 nucleotides, 235 nucleotides, 240 nucleotides, 245 nucleotides, 250 nucleotides, 255 nucleotides, 260 nucleotides, 265 nucleotides, 270 nucleotides, 275 nucleotides, 280 nucleotides, 285 nucleotides, 290 nucleotides, 295 nucleotides, 300 nucleotides, 305 nucleotides, 310 nucleotides, 315 nucleotides, 320 nucleotides, 325 nucleotides, 330 nucleotides, 335 nucleotides, 340 nucleotides, 345 nucleotides, 350 nucleotides, 355 nucleotides, 360 nucleotides, 365 nucleotides, 370 nucleotides, 375 nucleotides, 380 nucleotides, 385 nucleotides, 390 nucleotides, 395 nucleotides, 400 nucleotides, 405 nucleotides, 410 nucleotides, 415 nucleotides, 420 nucleotides, 425 nucleotides, 430 nucleotides, 435 nucleotides, 440 nucleotides, 445 nucleotides, 450 nucleotides, 455 nucleotides, 460 nucleotides, 465 nucleotides, 470 nucleotides, 475 nucleotides, 480 nucleotides, 485 nucleotides, 490 nucleotides, 495 nucleotides, or 500 nucleotides. In certain embodiments, the sgRNA is about 20 to about 100 nucleotides, e.g., about 20 nucleotides, e.g., 20 nucleotides, 21 nucleotides, 22 nucleotides, 23 nucleotides, 24 nucleotides, 25 nucleotides, 26 nucleotides, 27 nucleotides, 28 nucleotides, 29 nucleotides, 30 nucleotides, 31 nucleotides, 32 nucleotides, 33 nucleotides, 34 nucleotides, 35 nucleotides, 36 nucleotides, 37 nucleotides, 38 nucleotides, 39 nucleotides, 40 nucleotides, 41 nucleotides, 42 nucleotides, 43 nucleotides, 44 nucleotides, 45 nucleotides, 46 nucleotides, 47 nucleotides, 48 nucleotides, 49 nucleotides, 50 nucleotides, 51 nucleotides, 52 nucleotides, 53 nucleotides, 54 nucleotides, 55 nucleotides, 56 nucleotides, 57 nucleotides, 58 nucleotides, 59 nucleotides, 60 nucleotides, 61 nucleotides, 62 nucleotides, 63 nucleotides, 64 nucleotides, 65 nucleotides, 66 nucleotides, 67 nucleotides, 68 nucleotides, 69 nucleotides, 70 nucleotides, 71 nucleotides, 72 nucleotides, 73 nucleotides, 74 nucleotides, 75 nucleotides, 76 nucleotides, 77 nucleotides, 78 nucleotides, 79 nucleotides, 80 nucleotides, 81 nucleotides, 82 nucleotides, 83 nucleotides, 84 nucleotides, 85 nucleotides, 86 nucleotides, 87 nucleotides, 88 nucleotides, 89 nucleotides, 90 nucleotides, 91 nucleotides, 92 nucleotides, 93 nucleotides, 94 nucleotides, 95 nucleotides, 96 nucleotides, 97 nucleotides, 98 nucleotides, 99 nucleotides, or about 100 nucleotides.

[0133] The scaffold sequence can be about 10 to about 500 nucleotides, e.g., about 10 nucleotides, 15 nucleotides, 20 nucleotides, 25 nucleotides, 30 nucleotides, 35 nucleotides, 40 nucleotides, 45 nucleotides, 50 nucleotides, 55 nucleotides, 60 nucleotides, 65 nucleotides, 70 nucleotides, 75 nucleotides, 80 nucleotides, 85 nucleotides, 90 nucleotides, 95 nucleotides, 100 nucleotides, 105 nucleotides, 110 nucleotides, 120 nucleotides, 130 nucleotides, 140 nucleotides, 150 nucleotides, 160 nucleotides, 170 nucleotides, 180 nucleotides, 190 nucleotides, 200 nucleotides, 210 nucleotides, 220 nucleotides, 230 nucleotides, 240 nucleotides, 250 nucleotides, 260 nucleotides, 270 nucleotides, 280 nucleotides, 290 nucleotides, 300 nucleotides, 310 nucleotides, 320 nucleotides, 330 nucleotides, 340 nucleotides, 350 nucleotides, 360 nucleotides, 370 nucleotides, 380 nucleotides, 390 nucleotides, 400 nucleotides, 410 nucleotides, 420 nucleotides, 430 nucleotides, 440 nucleotides, 450 nucleotides, 460 nucleotides, 470 nucleotides, 480 nucleotides, 490 nucleotides, or about 500 nucleotides. In some embodiments, the scaffold sequence is about 20 to about 500 nucleotides, e.g., 20 nucleotides, 25 nucleotides, 30 nucleotides, 35 nucleotides, 40 nucleotides, 45 nucleotides, 50 nucleotides, 55 nucleotides, 60 nucleotides, 65 nucleotides, 70 nucleotides, 75 nucleotides, 80 nucleotides, 85 nucleotides, 90 nucleotides, 95 nucleotides, 100 nucleotides, 105 nucleotides 110 nucleotides, 115 nucleotides, 120 nucleotides, 125 nucleotides, 130 nucleotides, 135 nucleotides, 140 nucleotides, 145 nucleotides, 150 nucleotides, 155 nucleotides, 160 nucleotides, 165 nucleotides, 170 nucleotides, 175 nucleotides, 180 nucleotides, 185 nucleotides, 190 nucleotides, 195 nucleotides, 200 nucleotides, 205 nucleotides, 210 nucleotides, 215 nucleotides, 220 nucleotides, 225 nucleotides, 230 nucleotides, 235 nucleotides, 240 nucleotides, 245 nucleotides, 250 nucleotides, 255 nucleotides, 260 nucleotides, 265 nucleotides, 270 nucleotides, 275 nucleotides, 280 nucleotides, 285 nucleotides, 290 nucleotides, 295 nucleotides, 300 nucleotides, 305 nucleotides, 310 nucleotides, 315 nucleotides, 320 nucleotides, 325 nucleotides, 330 nucleotides, 335 nucleotides, 340 nucleotides, 345 nucleotides, 350 nucleotides, 355 nucleotides, 360 nucleotides, 365 nucleotides, 370 nucleotides, 375 nucleotides, 380 nucleotides, 385 nucleotides, 390 nucleotides, 395 nucleotides, 400 nucleotides, 405 nucleotides, 410 nucleotides, 415 nucleotides, 420 nucleotides, 425 nucleotides, 430 nucleotides, 435 nucleotides, 440 nucleotides, 445 nucleotides, 450 nucleotides, 455 nucleotides, 460 nucleotides, 465 nucleotides, 470 nucleotides, 475 nucleotides, 480 nucleotides, 485 nucleotides, 490 nucleotides, 495 nucleotides, or 500 nucleotides. In certain embodiments, the scaffold sequence is about 20 to about 100 nucleotides, e.g., about 20 nucleotides, e.g., 20 nucleotides, 21 nucleotides, 22 nucleotides, 23 nucleotides, 24 nucleotides, 25 nucleotides, 26 nucleotides, 27 nucleotides, 28 nucleotides, 29 nucleotides, 30 nucleotides, 31 nucleotides, 32 nucleotides, 33 nucleotides, 34 nucleotides, 35 nucleotides, 36 nucleotides, 37 nucleotides, 38 nucleotides, 39 nucleotides, 40 nucleotides, 41 nucleotides, 42 nucleotides, 43 nucleotides, 44 nucleotides, 45 nucleotides, 46 nucleotides, 47 nucleotides, 48 nucleotides, 49 nucleotides, 50 nucleotides, 51 nucleotides, 52 nucleotides, 53 nucleotides, 54 nucleotides, 55 nucleotides, 56 nucleotides, 57 nucleotides, 58 nucleotides, 59 nucleotides, 60 nucleotides, 61 nucleotides, 62 nucleotides, 63 nucleotides, 64 nucleotides, 65 nucleotides, 66 nucleotides, 67 nucleotides, 68 nucleotides, 69 nucleotides, 70 nucleotides, 71 nucleotides, 72 nucleotides, 73 nucleotides, 74 nucleotides, 75 nucleotides, 76 nucleotides, 77 nucleotides, 78 nucleotides, 79 nucleotides, 80 nucleotides, 81 nucleotides, 82 nucleotides, 83 nucleotides, 84 nucleotides, 85 nucleotides, 86 nucleotides, 87 nucleotides, 88 nucleotides, 89 nucleotides, 90 nucleotides, 91 nucleotides, 92 nucleotides, 93 nucleotides, 94 nucleotides, 95 nucleotides, 96 nucleotides, 97 nucleotides, 98 nucleotides, 99 nucleotides, or about 100 nucleotides.

[0134] The nucleotides of the sgRNA can include a modification in the ribose (e.g., sugar) group, phosphate group, nucleobase, or any combination thereof. In some embodiments, the modification in the ribose group comprises a modification at the 2′ position of the ribose.

[0135] In some embodiments, the nucleotide includes a 2′ fluoro-arabino nucleic acid, tricycle-DNA (tc-DNA), peptide nucleic acid, cyclohexene nucleic acid (CeNA), locked nucleic acid (LNA), ethylene-bridged nucleic acid (ENA), a phosphodiamidate morpholino, or a combination thereof.

[0136] Modified nucleotides or nucleotide analogues can include sugar- and/or backbone-ribonucleotides (i.e., include modifications to the phosphate-sugar backbone). For example, the phosphodiester linkages of a native or natural RNA may be to include at least one of a nitrogen or sulfur heteroatom. In some backbone-ribonucleotides the phosphoester group connecting to adjacent ribonucleotides may be replaced by a group, e.g., of phosphothioate group. In some sugar-ribonucleotides, the 2′ moiety is a group selected from H, OR, R, halo, SH, SR, H2, HR, R₂ or ON, wherein R is C₁-C6 alkyl, alkenyl or alkynyl and halo is F, Cl, Br, or I.

[0137] In some embodiments, the nucleotide contains a sugar modification. Non-limiting examples of sugar modifications include 2′-deoxy-2′-fluoro-oligoribonucleotide (2′-fluoro-2′-deoxycytidine-5′-triphosphate, 2′-fluoro-2′-deoxyuridine-5′-triphosphate), 2′-deoxy-2′-deamine oligoribonucleotide (2′-amino-2′-deoxycytidine-5′-triphosphate, 2′-amino-2′-deoxyuridine-5′-triphosphate), 2′-O-alkyl oligoribonucleotide, 2′-deoxy-2′-C-alkyl oligoribonucleotide (2′-O-methylcytidine-5′-triphosphate, 2′-methyluridine-5′-triphosphate), 2′-C-alkyl oligoribonucleotide, and isomers thereof (2′-aracytidine-5′-triphosphate, 2′-arauridine-5′-triphosphate), azidotriphosphate (2′-azido-2′-deoxycytidine-5′-triphosphate, 2′-azido-2′-deoxyuridine-5′-triphosphate), and combinations thereof.

[0138] In some embodiments, the sgRNA contains one or more 2′-fluro, 2′-amino and/or 2′-thio modifications. In some instances, the modification is a 2′-fluoro-cytidine, 2′-fluoro-uridine, 2′-fluoro-adenosine, 2′-fluoro-guanosine, 2′-amino-cytidine, 2′-amino-uridine, 2′-amino-adenosine, 2′-amino-guanosine, 2,6-diaminopurine, 4-thio-uridine, 5-amino-allyl-uridine, 5-bromo-uridine, 5-iodo-uridine, 5-methyl-cytidine, ribo-thymidine, 2-aminopurine, 2′-amino-butyryl-pyrene-uridine, 5-fluoro-cytidine, and/or 5-fluoro-uridine.

[0139] There are more than 96 naturally occurring nucleoside modifications found on mammalian RNA. See, e.g., Limbach et al., Nucleic Acids Research, 22(12):2183-2196 (1994). The preparation of nucleotides and nucleotides and nucleosides are well-known in the art and described in, e.g., U.S. Pat. Nos. 4,373,071, 4,458,066, 4,500,707, 4,668,777, 4,973,679, 5,047,524, 5,132,418, 5,153,319, 5,262,530, and 5,700,642. Numerous nucleosides and nucleotides that are suitable for use as described herein are commercially available. The nucleoside can be an analogue of a naturally occurring nucleoside. In some cases, the analogue is dihydrouridine, methyladenosine, methylcytidine, methyluridine, methylpseudouridine, thiouridine, deoxycytodine, and deoxyuridine.

[0140] In some cases, the sgRNA described herein includes a nucleobase-ribonucleotide, i.e., a ribonucleotide containing at least one non-naturally occurring nucleobase instead of a naturally occurring nucleobase. Non-limiting examples of nucleobases which can be incorporated into nucleosides and nucleotides include m5C (5-methylcytidine), m5U (5-methyluridine), m6A (N6-methyladenosine), s2U (2-thiouridine), Um (2′-O-methyluridine), mlA (1-methyl adenosine), m2A (2-methyladenosine), Am (2-1-O-methyladenosine), ms2m6A (2-methylthio-N6-methyladenosine), i6A (N6-isopentenyl adenosine), ms216A (2-methylthio-N6isopentenyladenosine), io6A (N6-(cis-hydroxyisopentenyl) adenosine), ms2io6A (2-methylthio-N6-(cis-hydroxyisopentenyl)adenosine), g6A (N6-glycinylcarbamoyladenosine), t6A (N6-threonyl carbamoyladenosine), ms2t6A (2-methylthio-N6-threonyl carbamoyladenosine), m6t6A (N6-methyl-N6-threonylcarbamoyladenosine), hn6A (N6-hydroxynorvalylcarbamoyl adenosine), ms2hn6A (2-methylthio-N6-hydroxynorvalyl carbamoyladenosine), Ar(p) (2′-O-ribosyladenosine(phosphate)), I (inosine), mi 1 (1-methylinosine), m′lm (1,2′-O-dimethylinosine), m3C (3-methylcytidine), Cm (2T-o-methylcytidine), s2C (2-thiocytidine), ac4C (N4-acetylcytidine), f5C (5-fonnylcytidine), m5 Cm (5,2-O-dimethylcytidine), ac4 Cm (N4acetyl2TOmethylcytidine), k2C (lysidine), mlG (1-methylguanosine), m2G (N2-methylguanosine), m7G (7-methylguanosine), Gm (2′-O-methylguanosine), m22G (N2,N2-dimethylguanosine), m2Gm (N2,2′-O-dimethylguanosine), m22Gm (N2,N2,2′-O-trimethylguanosine), Gr(p) (2′-O-ribosylguanosine(phosphate)), yW (wybutosine), o2yW (peroxywybutosine), OHyW (hydroxywybutosine), OHyW* (under hydroxywybutosine), imG (wyosine), mimG (methylguanosine), Q (queuosine), oQ (epoxyqueuosine), galQ (galtactosyl-queuosine), manQ (mannosyl-queuosine), preQo (7-cyano-7-deazaguanosine), preQi (7-aminomethyl-7-deazaguanosine), G (archaeosine), D (dihydrouridine), m5Um (5,2′-O-dimethyluridine), s4U (4-thiouridine), m5s2U (5-methyl-2-thiouridine), s2Um (2-thio-2′-O-methyluridine), acp3U (3-(3-amino-3-carboxypropyl)uridine), ho5U (5-hydroxyuridine), mo5U (5-methoxyuridine), cmo5U (uridine 5-oxyacetic acid), mcmo5U (uridine 5-oxyacetic acid methyl ester), chm5U (5-(carboxyhydroxymethyl)uridine)), mchm5U (5-(carboxyhydroxymethyl)uridine methyl ester), mcm5U (5-methoxycarbonyl methyluridine), mcm5Um (S-methoxycarbonylmethyl-2-O-methyluridine), mcm5s2U (5-methoxycarbonylmethyl-2-thiouridine), nm5s2U (5-aminomethyl-2-thiouridine), mnm5U (5-methylaminomethyluridine), mnm5s2U (5-methylaminomethyl-2-thiouridine), mnm5se2U (5-methylaminomethyl-2-selenouridine), ncm5U (5-carbamoylmethyl uridine), ncm5Um (5-carbamoylmethyl-2′-O-methyluridine), cmnm5U (5-carboxymethylaminomethyluridine), cnmm5Um (5-carboxymethylaminomethyl-2-L-Omethyluridine), cmnm5s2U (5-carboxymethylaminomethyl-2-thiouridine), m62A (N6,N6-dimethyladenosine), Tm (2′-O-methylinosine), m4C (N4-methylcytidine), m4 Cm (N4,2-O-dimethylcytidine), hm5C (5-hydroxymethylcytidine), m3U (3-methyluridine), cm5U (5-carboxymethyluridine), m6Am (N6, T-O-dimethyladenosine), rn62Am (N6,N6,0-2-trimethyladenosine), m2′7G (N2,7-dimethylguanosine), m2′2′7G (N2,N2,7-trimethylguanosine), m3Um (3,2T-O-dimethyluridine), m5D (5-methyldihydrouridine), f5 Cm (5-formyl-2′-O-methylcytidine), mlGm (1,2′-O-dimethylguanosine), m′Am (1,2-O-dimethyl adenosine)irinomethyluridine), tm5s2U (S-taurinomethyl-2-thiouridine)), imG-14 (4-demethyl guanosine), imG2 (isoguanosine), or ac6A (N6-acetyladenosine), hypoxanthine, inosine, 8-oxo-adenine, 7-substituted derivatives thereof, dihydrouracil, pseudouracil, 2-thiouracil, 4-thiouracil, 5-aminouracil, 5-(C₁-C₆)-alkyluracil, 5-methyluracil, 5-(C₂-C₆)-alkenyluracil, 5-(C₂-C₆)-alkynyluracil, 5-(hydroxymethyl)uracil, 5-chlorouracil, 5-fluorouracil, 5-bromouracil, 5-hydroxy cytosine, 5-(C₁-C₆)-alkylcytosine, 5-methylcytosine, 5-(C₂-C₆)-alkenylcytosine, 5-(C₂-C₆)-alkynylcytosine, 5-chlorocytosine, 5-fluorocytosine, 5-bromocytosine, N2-dimethylguanine, 7-deazaguanine, 8-azaguanine, 7-deaza-7-substituted guanine, 7-deaza-7-(C₂-C₆)alkynylguanine, 7-deaza-8-substituted guanine, 8-hydroxyguanine, 6-thioguanine, 8-oxoguanine, 2-aminopurine, 2-amino-6-chloropurine, 2,4-diaminopurine, 2,6-diaminopurine, 8-azapurine, substituted 7-deazapurine, 7-deaza-7-substituted purine, 7-deaza-8-substituted purine, and combinations thereof.

[0141] The sgRNA can be synthesized by any method known by one of ordinary skill in the art. In some embodiments, the sgRNA is chemically synthesized. Modified sgRNAs can be synthesized using 2′-O-thionocarbamate-protected nucleoside phosphoramidites. Methods are described in, e.g., Dellinger et al., J. American Chemical Society, 133, 11540-11556 (2011); Threlfall et al., Organic & Biomolecular Chemistry, 10, 746-754 (2012); and Dellinger et al, J. American Chemical Society, 125, 940-950 (2003). Modified sgRNAs are commercially available from, e.g., TriLink BioTechnologies (San Diego, CA).

[0142] Additional detailed description of useful sgRNAs can be found in, e.g., Hendel et al., Nat Biotechnol, 2015, 33(9): 985-989 and Dever et al., Nature, 2016, 539: 384-389, the disclosures are herein incorporated by reference in their entirety for all purposes.

[0143] A person having skill in the art will appreciate that a guide RNA as disclosed in the present disclosure may be used in combination with any Cas protein known in the art (e.g., any Cas type, from any suitable organism or bacterial species.

[0144] The Cas protein may be a type I, type II, type III, type IV, type V, or type VI Cas protein. The Cas protein may comprise one or more domains. Non-limiting examples of domains include, a guide nucleic acid recognition and/or binding domain, nuclease domains (e.g., DNase or RNase domains, RuvC, HNH), DNA binding domain, RNA binding domain, helicase domains, protein-protein interaction domains, and dimerization domains. The guide nucleic acid recognition and/or binding domain may interact with a guide nucleic acid. The nuclease domain may comprise catalytic activity for nucleic acid cleavage. The nuclease domain may lack catalytic activity to prevent nucleic acid cleavage. The Cas protein may be a chimeric Cas protein that is fused to other proteins or polypeptides. The Cas protein may be a chimera of various Cas proteins, for example, comprising domains from different Cas proteins.

[0145] Non-limiting examples of Cas proteins include c2c1, C₂c2, c2c3, Cas1, Cas1B, Cas2, Cas3, Cas4, Cas5, Cas5e (CasD), Cash, Cas6e, Cas6f, Cas7, Cas8a, Cas8al, Cas8a2, Cas8b, Cas8c, Cas9 (Csn1 or Csx12), Cas10, Cas10d, Cas10, Cas1Od, CasF, CasG, CasH, Cpf1, Csy1, Csy2, Csy3, Cse1 (CasA), Cse2 (CasB), Cse3 (CasE), Cse4 (CasC), Csc1, Csc2, Csa5, Csn2, Csm2, Csm3, Csm4, Csm5, Csm6, Cmr1, Cmr3, Cmr4, Cmr5, Cmr6, Csb1, Csb2, Csb3, Csx17, Csx14, Csx10, Csx16, CsaX, Csx3, Csx1, Csx15, Csf1, Csf2, Csf3, Csf4, and Cul966, and homologs or modified versions thereof.

[0146] The Cas protein may be from any suitable organism. Non-limiting examples include Streptococcus pyogenes, Streptococcus thermophilus, Streptococcus sp., Staphylococcus aureus, Nocardiopsis dassonvillei, Streptomyces pristinae spiralis, Streptomyces viridochromo genes, Streptomyces viridochromogenes, Streptosporangium roseum, Streptosporangium roseum, Alicyclobacillus acidocaldarius, Bacillus pseudomycoides, Bacillus selenitireducens, Exiguobacterium sibiricum, Lactobacillus delbrueckii, Lactobacillus salivarius, Microscilla marina, Burkholderiales bacterium, Polaromonas naphthalenivorans, Polaromonas sp., Crocosphaera watsonii, Cyanothece sp., Microcystis aeruginosa, Pseudomonas aeruginosa, Synechococcus sp., Acetohalobium arabaticum, Ammonifex degensii, Caldicellulosiruptor becscii, Candidatus Desulforudis, Clostridium botulinum, Clostridium difficile, Finegoldia magna, Natranaerobius thermophilus, Pelotomaculum thermopropionicum, Acidithiobacillus caldus, Acidithiobacillus ferrooxidans, Allochromatium vinosum, Marinobacter sp., Nitrosococcus halophilus, Nitrosococcus watsoni, Pseudoalteromonas haloplanktis, Ktedonobacter racemifer, Methanohalobium evestigatum, Anabaena variabilis, Nodularia spumigena, Nostoc sp., Arthrospira maxima, Arthrospira platensis, Arthrospira sp., Lyngbya sp., Microcoleus chthonoplastes, Oscillatoria sp., Petrotoga mobilis, Thermosipho africanus, Acaryochloris marina, Leptotrichia shahii, and Francisella novicida. In some aspects, the organism is Streptococcus pyogenes (S. pyogenes). In some aspects, the organism is Staphylococcus aureus (S. aureus). In some aspects, the organism is Streptococcus thermophilus (S. thermophilus).

[0147] The Cas protein may be derived from a variety of bacterial species including, but not limited to, Veillonella atypical, Fusobacterium nucleatum, Filifactor alocis, Solobacterium moorei, Coprococcus catus, Treponema denticola, Peptoniphilus duerdenii, Catenibacterium mitsuokai, Streptococcus mutans, Listeria innocua, Staphylococcus pseudintermedius, Acidaminococcus intestine, Olsenella uli, Oenococcus kitaharae, Bifidobacterium bifidum, Lactobacillus rhamnosus, Lactobacillus gasseri, Finegoldia magna, Mycoplasma mobile, Mycoplasma gallisepticum, Mycoplasma ovipneumoniae, Mycoplasma canis, Mycoplasma synoviae, Eubacterium rectale, Streptococcus thermophilus, Eubacterium dolichum, Lactobacillus coryniformis subsp. Torquens, Ilyobacter polytropus, Ruminococcus albus, Akkermansia muciniphila, Acidothermus cellulolyticus, Bifidobacterium longum, Bifidobacterium dentium, Corynebacterium diphtheria, Elusimicrobium minutum, Nitratifractor salsuginis, Sphaerochaeta globus, Fibrobacter succinogenes subsp. Succinogenes, Bacteroides fragilis, Capnocytophaga ochracea, Rhodopseudomonas palustris, Prevotella micans, Prevotella ruminicola, Flavobacterium columnare, Aminomonas paucivorans, Rhodospirillum rubrum, Candidatus Puniceispirillum marinum, Verminephrobacter eiseniae, Ralstonia syzygii, Dinoroseobacter shibae, Azospirillum, Nitrobacter hamburgensis, Bradyrhizobium, Wolinella succinogenes, Campylobacter jejuni subsp. Jejuni, Helicobacter mustelae, Bacillus cereus, Acidovorax ebreus, Clostridium perfringens, Parvibaculum lavamentivorans, Roseburia intestinalis, Neisseria meningitidis, Pasteurella multocida subsp. Multocida, Sutterella wadsworthensis, proteobacterium, Legionella pneumophila, Parasutterella excrementihominis, Wolinella succinogenes, and Francisella novicida. The term, “derived,” in this instance, is defined as modified from the naturally-occurring variety of bacterial species to maintain a significant portion or significant homology to the naturally-occurring variety of bacterial species. A significant portion may be at least 10 consecutive nucleotides, at least 20 consecutive nucleotides, at least 30 consecutive nucleotides, at least 40 consecutive nucleotides, at least 50 consecutive nucleotides, at least 60 consecutive nucleotides, at least 70 consecutive nucleotides, at least 80 consecutive nucleotides, at least 90 consecutive nucleotides or at least 100 consecutive nucleotides. Significant homology may be at least 50% homologous, at last 60% homologous, at least 70% homologous, at least 80% homologous, at least 90% homologous, or at least 95% homologous. The derived species may be modified while retaining an activity of the naturally-occurring variety.

### Gene Editing Methods

[0148] As discussed above, embodiments of the present disclosure provide compositions and methods to treat joint disorders, wherein a portion of the joint cells are genetically modified via gene-editing to treat a joint disorder. Embodiments of the present disclosure embrace genetic editing through nucleotide insertion (RNA or DNA), or recombinant protein insertion, into a population of synoviocytes for both promotion of the expression of one or more proteins and inhibition of the expression of one or more proteins, as well as combinations thereof. Embodiments of the present disclosure also provide methods for delivering gene-editing compositions to joint cells, and in particular delivering gene-editing compositions to synoviocytes. There are several gene-editing technologies that may be used to genetically modify joint cells, which are suitable for use in accordance with the present disclosure.

[0149] In some embodiments, a method of genetically modifying joint cells includes the step of stable incorporation of genes for production of one or more proteins. In an embodiment, a method of genetically modifying a portion of a joint's synoviocytes includes the step of retroviral transduction. In an embodiment, a method of genetically modifying a portion of a joint's synoviocytes includes the step of lentiviral transduction. Lentiviral transduction systems are known in the art and are described, e.g., in Levine, et al., Proc. Nat'l Acad. Sci. 2006, 103, 17372-77; Zufferey, et al., Nat. Biotechnol. 1997, 15, 871-75; Dull, et al., J. Virology 1998, 72, 8463-71, and U.S. Pat. No. 6,627,442, the disclosures of each of which are incorporated by reference herein. In an embodiment, a method of genetically modifying a portion of a joint's synoviocytes includes the step of gamma-retroviral transduction. Gamma-retroviral transduction systems are known in the art and are described, e.g., Cepko and Pear, Cur. Prot. Mol. Biol. 1996, 9.9.1-9.9.16, the disclosure of which is incorporated by reference herein. In an embodiment, a method of genetically modifying a portion of a joint's synoviocytes includes the step of transposon-mediated gene transfer. Transposon-mediated gene transfer systems are known in the art and include systems wherein the transposase is provided as DNA expression vector or as an expressible RNA or a protein such that long-term expression of the transposase does not occur in the transgenic cells, for example, a transposase provided as an mRNA (e.g., an mRNA comprising a cap and poly-A tail). Suitable transposon-mediated gene transfer systems, including the salmonid-type Tel-like transposase (SB or Sleeping Beauty transposase), such as SB10, SB11, and SB100x, and engineered enzymes with increased enzymatic activity, are described in, e.g., Hackett, et al., Mol. Therapy 2010, 18, 674-83 and U.S. Pat. No. 6,489,458, the disclosures of each of which are incorporated by reference herein.

[0150] In some aspects, viral vectors or systems are used to introduce a gene-editing system into cells comprising a joint. In some aspects, the cells are synovial fibroblasts. In some aspects, the viral vectors are an AAV vector. In some aspects, the AAV vector comprises a serotype selected from the group consisting of: AAV1, AAV1 (Y705+731F+T492V), AAV2 (Y444+500+730F+T491V), AAV3 (Y705+731F), AAV4, AAV5, AAV5 (Y436+693+719F), AAV6, AAV6 (VP3 variant Y705F/Y731F/T492V), AAV-7m8, AAV8, AAV8 (Y733F), AAV9, AAV9 (VP3 variant Y731F), AAV10 (Y733F), AAV-ShH10, and AAV-DJ/8. In some aspects, the AAV vector comprises a serotype selected from the group consisting of: AAV1, AAV5, AAV6, AAV6 (Y705F/Y731F/T492V), AAV8, AAV9, and AAV9 (Y731F).

[0151] In some aspects, the viral vector is a lentivirus. In an aspect, the lentivirus is selected from the group consisting of: human immunodeficiency-1 (HIV-1), human immunodeficiency-2 (HIV-2), simian immunodeficiency virus (SIV), feline immunodeficiency virus (FIV), bovine immunodeficiency virus (BIV), Jembrana Disease Virus (JDV), equine infectious anemia virus (EIAV), and caprine arthritis encephalitis virus (CAEV). In some aspects, the viral vector is a lentivirus vector. In an aspect, the lentivirus vector is selected from the group consisting of: human immunodeficiency-1 (HIV-1) vector, human immunodeficiency-2 (HIV-2) vector, simian immunodeficiency virus (SIV) vector, feline immunodeficiency virus (FIV) vector, bovine immunodeficiency virus (BIV) vector, Jembrana Disease Virus (JDV) vector, equine infectious anemia virus (EIAV) vector, and caprine arthritis encephalitis virus (CAEV) vector.

[0152] In an embodiment, a method of genetically modifying a portion of a joint's synoviocytes includes the step of stable incorporation of genes for production or inhibition (e.g., silencing) of one or more proteins. In an embodiment, a method of genetically modifying a portion of a joint's synoviocytes includes the step of liposomal transfection. Liposomal transfection methods, such as methods that employ a 1:1 (w/w) liposome formulation of the cationic lipid N-[1-(2,3-dioleyloxy)propyl]-n,n,n-trimethylammonium chloride (DOTMA) and dioleoyl phophotidylethanolamine (DOPE) in filtered water, are known in the art and are described in Rose, et al., Biotechniques 1991, 10, 520-525 and Felgner, et al., Proc. Natl. Acad. Sci. USA, 1987, 84, 7413-7417 and in U.S. Pat. Nos. 5,279,833; 5,908,635; 6,056,938; 6,110,490; 6,534,484; and 7,687,070, the disclosures of each of which are incorporated by reference herein. In an embodiment, a method of genetically modifying a portion of a joint's synoviocytes includes the step of transfection using methods described in U.S. Pat. Nos. 5,766,902; 6,025,337; 6,410,517; 6,475,994; and 7,189,705; the disclosures of each of which are incorporated by reference herein.

[0153] According to an embodiment, the gene-editing process may comprise the use of a programmable nuclease that mediates the generation of a double-strand or single-strand break at one or more immune checkpoint genes. Such programmable nucleases enable precise genome editing by introducing breaks at specific genomic loci, i.e., they rely on the recognition of a specific DNA sequence within the genome to target a nuclease domain to this location and mediate the generation of a double-strand break at the target sequence. A double-strand break in the DNA subsequently recruits endogenous repair machinery to the break site to mediate genome editing by either non-homologous end-joining (NHEJ) or homology-directed repair (HDR). Thus, the repair of the break can result in the introduction of insertion/deletion mutations that disrupt (e.g., silence, repress, or enhance) the target gene product.

[0154] Major classes of nucleases that have been developed to enable site-specific genomic editing include zinc finger nucleases (ZFNs), transcription activator-like nucleases (TALENs), and CRISPR-associated nucleases (e.g., CRISPR-Cas9). These nuclease systems can be broadly classified into two categories based on their mode of DNA recognition: ZFNs and TALENs achieve specific DNA binding via protein-DNA interactions, whereas CRISPR systems, such as Cas9, are targeted to specific DNA sequences by a short RNA guide molecule that base-pairs directly with the target DNA and by protein-DNA interactions. See, e.g., Cox et al., Nature Medicine, 2015, Vol. 21, No. 2.

[0155] Non-limiting examples of gene-editing methods that may be used in accordance with the methods of the present disclosure include CRISPR methods, TALE methods, and ZFN methods, which are described in more detail below.

### CRISPR Methods

[0156] A pharmaceutical composition for the treatment or prevention of a joint disease or condition comprising a gene-editing system, wherein said gene-editing system targets at least one locus related to joint function, wherein the gene-editing at least a portion of a joint's synoviocytes by a CRISPR method (e.g., CRISPR-Cas9, CRISPR-Cas13a, or CRISPR/Cpf1 (also known as CRISPR-Cas12a). According to particular embodiments, the use of a CRISPR method to gene-edit joint synoviocytes causes expression of one or more immune checkpoint genes to be silenced or reduced in at least a portion of the joint's synoviocytes.

[0157] CRISPR stands for “Clustered Regularly Interspaced Short Palindromic Repeats.” A method of using a CRISPR system for gene editing is also referred to herein as a CRISPR method. There are three types of CRISPR systems which incorporate RNAs and Cas proteins, and which may be used in accordance with the present disclosure: Types II, V, and VI. The Type II CRISPR (exemplified by Cas9) is one of the most well-characterized systems.

[0158] CRISPR technology was adapted from the natural defense mechanisms of bacteria and archaea (the domain of single-celled microorganisms). These organisms use CRISPR-derived RNA and various Cas proteins, including Cas9, to foil attacks by viruses and other foreign bodies by chopping up and destroying the DNA, or RNA, of a foreign invader. A CRISPR is a specialized region of DNA with two distinct characteristics: the presence of nucleotide repeats and spacers. Repeated sequences of nucleotides are distributed throughout a CRISPR region with short segments of foreign DNA (spacers) interspersed among the repeated sequences. In the type II CRISPR-Cas system, spacers are integrated within the CRISPR genomic loci and transcribed and processed into short CRISPR RNA (crRNA). These crRNAs anneal to trans-activating crRNAs (tracrRNAs) and direct sequence-specific cleavage and silencing of pathogenic DNA by Cas proteins. Target recognition by the Cas9 protein requires a “seed” sequence within the crRNA and a conserved dinucleotide-containing protospacer adjacent motif (PAM) sequence upstream of the crRNA-binding region. The CRISPR-Cas system can thereby be retargeted to cleave virtually any DNA sequence by redesigning the crRNA. The crRNA and tracrRNA in the native system can be simplified into a single guide RNA (sgRNA) of approximately 100 nucleotides for use in genetic engineering. The CRISPR-Cas system is directly portable to human cells by co-delivery of plasmids expressing the Cas9 endo-nuclease and the necessary crRNA and tracrRNA (or sgRNA) components. Different variants of Cas proteins may be used to reduce targeting limitations (e.g., orthologs of Cas9, such as Cpf1).

### CRSIPR-Cas Mediated Homologous Recombination

[0159] The CRISPR-Cas system for homologous recombination (HR) includes a Cas nuclease (e.g., Cas9 nuclease) or a variant or fragment thereof, a DNA-targeting RNA (e.g., single guide RNA (sgRNA)) containing a guide sequence that targets the Cas nuclease to the target genomic DNA and a scaffold sequence that interacts with the Cas nuclease, and a donor template. The CRISPR-Cas system can be utilized to create a double-strand break at a desired target gene locus in the genome of a cell, and harness the cell's endogenous mechanisms to repair the induced break by homology-directed repair (HDR).

[0160] The CRISPR-Cas9 nuclease can facilitate locus-specific chromosomal integration of exogenous DNA delivered by AAV vectors. Typically, the size of the exogenous DNA (e.g., transgene, expression cassette, and the like) that can be integrated is limited by the DNA packaging capacity of an AAV vector which is about 4.0 kb. With the inclusion of two homology arms that are necessary for homologous recombination, a single AAV vector can only deliver less than about 3.7 kb of exogenous DNA. The method described herein allows for the delivery of exogenous DNA that is 4 kb or longer by splitting the nucleotide sequence between two different AAV vectors. The donor templates are designed for sequential homologous recombination events that can integrate and fuse the two parts of the nucleotide sequence.

[0161] Homologous recombination of the present disclosure can be performed using an engineered nuclease system for genome editing such as, but not limited to, CRISPR-Cas nucleases, zinc finger nucleases (ZFNs), transcription activator-like effector nucleases (TALENs), engineered mega-nucleases. In one aspect, a CRISPR-Cas-based nuclease system is used. Detailed descriptions of useful nuclease system can be found, e.g., in Gaj et al., Trends Biotechnol, 2013 July: 31(7):397-405.

[0162] Any suitable CRISPR/Cas system may be used for the methods and compositions disclosed herein. The CRISPR/Cas system may be referred to using a variety of naming systems. Exemplary naming systems are provided in Makarova, K. S. et al, “An updated evolutionary classification of CRISPR-Cas systems,” Nat Rev Microbiol (2015) 13:722-736 and Shmakov, S. et al, “Discovery and Functional Characterization of Diverse Class 2 CRISPR-Cas Systems,” Mol Cell (2015) 60:1-13. The CRISPR/Cas system may be a type I, a type II, a type III, a type IV, a type V, a type VI system, or any other suitable CRISPR/Cas system. The CRISPR/Cas system as used herein may be a Class 1, Class 2, or any other suitably classified CRISPR/Cas system. The Class 1 CRISPR/Cas system may use a complex of multiple Cas proteins to effect regulation. The Class 1 CRISPR/Cas system may comprise, for example, type I (e.g., I, IA, IB, IC, ID, IE, IF, IU), type III (e.g., III, IIIA, IIIB, IIIC, IIID), and type IV (e.g., IV, IVA, IVB) CRISPR/Cas type. The Class 2 CRISPR/Cas system may use a single large Cas protein to effect regulation. The Class 2 CRISPR/Cas systems may comprise, for example, type II (e.g., II, IIA, IIB) and type V CRISPR/Cas type. CRISPR systems may be complementary to each other, and/or can lend functional units in trans to facilitate CRISPR locus targeting.

[0163] In some embodiments, a nucleotide sequence encoding the Cas nuclease is present in a recombinant expression vector. In certain instances, the recombinant expression vector is a viral construct, e.g., a recombinant adeno-associated virus construct, a recombinant adenoviral construct, a recombinant lentiviral construct, etc. For example, viral vectors can be based on vaccinia virus, poliovirus, adenovirus, adeno-associated virus, SV40, herpes simplex virus, human immunodeficiency virus, and the like. A retroviral vector can be based on Murine Leukemia Virus, spleen necrosis virus, and vectors derived from retroviruses such as Rous Sarcoma Virus, Harvey Sarcoma Virus, avian leukosis virus, a lentivirus, human immunodeficiency virus, myeloproliferative sarcoma virus, mammary tumor virus, and the like. Useful expression vectors are known to those of skill in the art, and many are commercially available. The following vectors are provided by way of example for eukaryotic host cells: pXTI, pSG5, pSVK3, pBPV, pMSG, and pSVLSV40. However, any other vector may be used if it is compatible with the host cell. For example, useful expression vectors containing a nucleotide sequence encoding a Cas9 enzyme are commercially available from, e.g., Addgene, Life Technologies, Sigma-Aldrich, and Origene.

[0164] Host cells are necessary for generating infectious AAV vectors as well as for generating AAV virions based on the disclosed AAV vectors. Various host cells are known in the art and find use in the methods of the present disclosure. Any host cells described herein or known in the art can be employed with the compositions and methods described herein.

[0165] In some embodiments, the host cell for use in generating infectious virions can be selected from any biological organism, including prokaryotic (e.g., bacterial) cells, and eukaryotic cells, including, insect cells, yeast cells and mammalian cells. A variety of cells, e.g., mammalian cells, including, e.g., murine cells, and primate cells (e.g., human cells) can be used. Particularly desirable host cells are selected from among any mammalian species, including, without limitation, cells such as A549, WEHI, 3T3, 10T1/2, BHK, MDCK, COS 1, COS 7, BSC 1, BSC 40, BMT 10, VERO, WI38, HeLa, CHO, 293, Vero, NIH 3T3, PC12, Huh-7 Saos, C2C12, RAT1, Sf9, L cells, HT1080, human embryonic kidney (HEK), human embryonic stem cells, human adult tissue stem cells, pluripotent stem cells, induced pluripotent stem cells, reprogrammed stem cells, organoid stem cells, bone marrow stem cells, HLHepG2, HepG2 and primary fibroblast, hepatocyte and myoblast cells derived from mammals including human, monkey, mouse, rat, rabbit, and hamster. The requirement for the cell used is it is capable of infection or transfection by an AAV vector. In some embodiments, the host cell is one that has rep and cap stably transfected in the cell.

[0166] In some embodiments, the preparation of a host cell according to the disclosure involves techniques such as assembly of selected DNA sequences. This assembly may be accomplished utilizing conventional techniques. Such techniques include cDNA and genomic cloning, which are well known and are described in Sambrook et al., cited above, use of overlapping oligonucleotide sequences of the adenovirus and AAV genomes, combined with polymerase chain reaction, synthetic methods, and any other suitable methods for providing the desired nucleotide sequence.

[0167] In addition to the AAV vector, the host cell can contain sequences to drive expression of the AAV capsid polypeptide (in the host cell and rep (replication) sequences of the same serotype as the serotype of the AAV Inverted Terminal Repeats (ITRs) found in the AAV vector, or a cross-complementing serotype. The AAV capsid and rep (replication) sequences may be independently obtained from an AAV source and may be introduced into the host cell in any manner known to one of skill in the art or as described herein. Additionally, when pseudotyping an AAV vector in an AAV8 capsid for example, the sequences encoding each of the essential rep (replication) proteins may be supplied by AAV8, or the sequences encoding the rep (replication) proteins may be supplied by different AAV serotypes (e.g., AAV1, AAV2, AAV3, AAV4, AAV5, AAV6, AAV7, and/or AAV9).

[0168] In some embodiments, the host cell stably contains the capsid protein under the control of a suitable promoter. In some embodiments, the capsid protein is supplied to the host cell in trans. When delivered to the host cell in trans, the capsid protein may be delivered via a plasmid containing the sequences necessary to direct expression of the selected capsid protein in the host cell. In some embodiments, when delivered to the host cell in trans, the vector encoding the capsid protein also carries other sequences required for packaging the AAV, e.g., the rep (replication) sequences.

[0169] In some embodiments, the host cell stably contains the rep (replication) sequences under the control of a suitable promoter. In another embodiment, the rep (replication) proteins are supplied to the host cell in trans. When delivered to the host cell in trans, the rep (replication) proteins may be delivered via a plasmid containing the sequences necessary to direct expression of the selected rep (replication) proteins in the host cell. In some embodiments, when delivered to the host cell in trans, the vector encoding the capsid protein (also carries other sequences required for packaging the AAV vector, e.g., the rep (replication) sequences.

[0170] In some embodiments, the rep (replication) and capsid sequences may be transfected into the host cell on a single nucleic acid molecule and exist stably in the cell as an unintegrated episome. In another embodiment, the rep (replication) and capsid sequences are stably integrated into the chromosome of the cell. Another embodiment has the rep (replication) and capsid sequences transiently expressed in the host cell. For example, a useful nucleic acid molecule for such transfection comprises, from 5′ to 3′, a promoter, an optional spacer interposed between the promoter and the start site of the rep (replication) gene sequence, an AAV rep (replication) gene sequence, and an AAV capsid gene sequence.

[0171] Although the molecule(s) providing rep (replication) and capsid can exist in the host cell transiently (i.e., through transfection), in some embodiments, one or both of the rep (replication) and capsid proteins and the promoter(s) controlling their expression be stably expressed in the host cell, e.g., as an episome or by integration into the chromosome of the host cell. The methods employed for constructing embodiments of the disclosure are conventional genetic engineering or recombinant engineering techniques such as those described in the references above.

[0172] A variety of methods of generating AAV virions are known in the art and can be used to generate AAV virions comprising the AAV vectors described herein. Generally, the methods involved inserting or transducing an AAV vector of the disclosure into a host cell capable of packaging the AAV vector into and AAV virion. Exemplary methods are described and referenced below; however, any method known to one of skill in the art can be employed to generate the AAV virions of the disclosure.

[0173] An AAV vector comprising a heterologous nucleic acid (e.g., a donor template) and used to generate an AAV virion can be constructed using methods that are well known in the art. See, e.g., Koerber et al. (2009) Mol. Ther., 17:2088; Koerber et al. (2008) Mol Ther., 16: 1703-1709; as well as U.S. Pat. Nos. 7,439,065, 6,951,758, and 6,491,907. For example, the heterologous sequence(s) can be directly inserted into an AAV genome with the major AAV open reading frames (“ORFs”) excised therefrom. Other portions of the AAV genome can also be deleted, so long as a sufficient portion of the ITRs remain to allow for replication and packaging functions. Such constructs can be designed using techniques well known in the art. See, e.g., U.S. Pat. Nos. 5,173,414 and 5,139,941; International Publication Nos. WO 92/01070 (published Jan. 23, 1992) and WO 93/03769 (published Mar. 4, 1993); Lebkowski et al. (1988) Molec. Cell. Biol. 8:3988-3996; Vincent et al. (1990) Vaccines 90 (Cold Spring Harbor Laboratory Press); Carter, B. J. (1992) Current Opinion in Biotechnology 3:533-539; Muzyczka, N. (1992) Curr. Topics Microbiol. Immunol. 158:97-129; Kotin, R. M. (1994) Human Gene Therapy 5:793-801; Shelling and Smith (1994) Gene Therapy 1:165-169; and Zhou et al. (1994) J. Exp. Med. 179: 1867-1875.

[0174] In order to produce AAV virions, an AAV vector is introduced into a suitable host cell using known techniques, such as by transfection. A number of transfection techniques are generally known in the art. See, e.g., Graham et al. (1973) Virology, 52:456, Sambrook et al. (1989) Molecular Cloning, A Laboratory Manual, Cold Spring Harbor Laboratories, New York, Davis et al. (1986) Basic Methods in Molecular Biology, Elsevier, and Chu et al. (1981) Gene 13:197. Particularly suitable transfection methods include calcium phosphate co-precipitation (Graham et al. (1973) Virol. 52:456-467), direct micro-injection into cultured cells (Capecchi, M. R. (1980) Cell 22:479-488), electroporation (Shigekawa et al. (1988) BioTechniques 6:742-751), liposome mediated gene transfer (Mannino et al. (1988) BioTechniques 6:682-690), lipid-mediated transduction (Felgner et al. (1987) Proc. Natl. Acad. Sci. USA 84:7413-7417), and nucleic acid delivery using high-velocity microprojectiles (Klein et al. (1987) Nature 327:70-73).

[0175] Depending on the expression system used, any of a number of transcription and translation control elements, including promoter, transcription enhancers, transcription terminators, and the like, may be used in the expression vector. Useful promoters can be derived from viruses, or any organism, e.g., prokaryotic or eukaryotic organisms. Suitable promoters include, but are not limited to, the SV40 early promoter, mouse mammary tumor virus long terminal repeat (LTR) promoter, adenovirus major late promoter (Ad MLP), a herpes simplex virus (HSV) promoter, a cytomegalovirus (CMV) promoter (such as the CMV immediate early promoter region; CMVIE), a rous sarcoma virus (RSV) promoter, a human U6 small nuclear promoter (U6), an enhanced U6 promoter, and a human HI promoter (HI), etc.

[0176] In some embodiments, polynucleotide encoding a Cas nuclease can be used in the present disclosure. Such a polynucleotide (e.g., mRNA) can be commercially obtained from, for example, TriLink BioTechnologies, GE Dharmacon, ThermoFisher, and the like.

[0177] In certain embodiments, a Cas nuclease (e.g., Cas9 polypeptide) can be used in the present disclosure. Detailed description of useful Cas9 polypeptides can be found in, e.g., Hendel et al., Nat Biotechnol, 2015, 33(9): 985-989 and Dever et al., Nature, 2016, 539: 384-389, the disclosures are herein incorporated by reference in their entirety for all purposes.

[0178] In some embodiments, a Cas nuclease (e.g., Cas9 polypeptide) is complexed with a sgRNA to form a Cas ribonucleoprotein (e.g., Cas9 ribonucleoprotein). The molar ratio of Cas nuclease to sgRNA can be any range that facilitates sequential homologous recombination of the targeting AAV vectors and target genetic locus. In some embodiments, the molar ratio of Cas9 polypeptide to sgRNA is about 1:5; 1:4; 1:3; 1:2.5; 1:2; or 1:1. In other embodiments, the molar ratio of Cas9 polypeptide to sgRNA is about 1:2 to about 1:3. In certain embodiments, the molar ratio of Cas9 polypeptide to sgRNA is about 1:2.5.

[0179] The Cas nuclease and variants or fragments thereof can be introduced into a cell (e.g., a cell isolated from a subject, or an in vivo cell such as in a subject) as a Cas polypeptide or a variant or fragment thereof, an mRNA encoding a Cas polypeptide or a variant or fragment thereof, a recombinant expression vector comprising a nucleotide sequence encoding a Cas polypeptide or a variant or fragment thereof, or a Cas ribonucleoprotein. One skilled in the art would recognize that any method of delivering an exogenous polynucleotide, polypeptide, or a ribonucleoprotein can be used. Non-limiting examples of such methods include electroporation, nucleofection, transfection, lipofection, transduction, microinjection, electroinjection, electrofusion, nanoparticle bombardment, transformation, conjugation, and the like.

[0180] Non-limiting examples of genes that may be silenced or inhibited by permanently gene-editing synoviocytes via a CRISPR method are provided in Table 1 and/or genes described in FIG. 20, and/or include IL-1α, IL-1β, IL-4, IL-9, IL-10, IL-13, and TNF-α.

[0181] Non-limiting examples of genes that may be enhanced by permanently gene-editing synoviocytes via a CRISPR method are provided in Table 1 and/or genes described in FIG. 20, and/or include IL-1α, IL-1β, IL-4, IL-9, IL-10, IL-13, and TNF-α.

[0182] In certain embodiments, methods of the present disclosure can be used to edit one or more genes associated with the production, blocking, and/or removal of reactive oxygen species (ROS). In certain embodiments, a gene associated with enhancing ROS removal can be edited (e.g., to repair a defect and/or enhance a function of a protein associated with the gene). For example, Superoxide dismutase (SOD), Catalase (CAT), and Glutathione peroxidase all function in the removal of reactive oxygen species to prevent cell damage. A person having skill in the art will appreciate that editing one or more these genes (e.g., to repair a gene mutation) using the invention of the present disclosure can improve or fully restore the ROS-removal capability of one or more proteins associated with these genes. A person having skill in the art will appreciate that editing one or more these genes (e.g., to induce a gene mutation) using the invention of the present disclosure can decrease or fully inhibit the ROS-producing capability of one or more proteins associated with these genes. Non-limiting examples of genes that can be edited (and their associated proteins) are provided in Table 1 and/or genes described in FIG. 20. Additional genes and proteins associated with ROS Production, Blocking, and/or Removal can be found, for example, in Bae, et al., “Regulation of Reactive Oxygen Species Generation in Cell Signaling,” 2011 Dec. 31; and Herb et al., “Mitochondrial reactive oxygen species enable proinflammatory signaling through disulfide linkage of NEMO,” 2019 Feb. 12, each of which is incorporated by reference herein for all purposes.

[0183] Examples of systems, methods, and compositions for altering the expression of a target gene sequence by a CRISPR method, and which may be used in accordance with embodiments of the present disclosure, are described in U.S. Pat. Nos. 8,697,359; 8,993,233; 8,795,965; 8,771,945; 8,889,356; 8,865,406; 8,999,641; 8,945,839; 8,932,814; 8,871,445; 8,906,616; and 8,895,308, which are incorporated by reference herein. Resources for carrying out CRISPR methods, such as plasmids for expressing CRISPR-Cas9 and CRISPR-Cpf1, are commercially available from companies such as GenScript.

[0184] In an embodiment, genetic modifications of at least a portion of a joint's synoviocytes, as described herein, may be performed using the CRISPR-Cpf1 system as described in U.S. Pat. No. 9,790,490, the disclosure of which is incorporated by reference herein.

[0185] In an embodiment, genetic modifications of at least a portion of a joint's synoviocytes, as described herein, may be performed using a CRISPR-Cas system comprising single vector systems as described in U.S. Pat. No. 9,907,863, the disclosure of which is incorporated by reference herein. TALE Methods

[0186] A pharmaceutical composition for the treatment or prevention of a joint disease or condition comprising a gene-editing system, wherein said gene-editing system targets at least one locus related to joint function, wherein the method further comprises gene-editing at least a portion of joint synoviocytes by a TALE method. According to particular embodiments, the use of a TALE method to target at least one locus related to joint function, wherein the gene-editing at least a portion of a joint's synoviocytes. Alternatively, the use of a TALE method during to target at least one locus related to joint function, wherein the gene-editing at least a portion of a joint's synoviocytes to cause expression of at least one locus related to joint function genes to be enhanced in at least a portion of the joint synoviocytes.

[0187] TALE stands for “Transcription Activator-Like Effector” proteins, which include TALENs (“Transcription Activator-Like Effector Nucleases”). A method of using a TALE system for gene editing may also be referred to herein as a TALE method. TALEs are naturally occurring proteins from the plant pathogenic bacteria genus Xanthomonas, and contain DNA-binding domains composed of a series of 33-35-amino-acid repeat domains that each recognizes a single base pair. TALE specificity is determined by two hypervariable amino acids that are known as the repeat-variable di-residues (RVDs). Modular TALE repeats are linked together to recognize contiguous DNA sequences. A specific RVD in the DNA-binding domain recognizes a base in the target locus, providing a structural feature to assemble predictable DNA-binding domains. The DNA binding domains of a TALE are fused to the catalytic domain of a type IIS FokI endonuclease to make a targetable TALE nuclease. To induce site-specific mutation, two individual TALEN arms, separated by a 14-20 base pair spacer region, bring FokI monomers in close proximity to dimerize and produce a targeted double-strand break.

[0188] Several large, systematic studies utilizing various assembly methods have indicated that TALE repeats can be combined to recognize virtually any user-defined sequence. Custom-designed TALE arrays are also commercially available through Cellectis Bioresearch (Paris, France), Transposagen Biopharmaceuticals (Lexington, KY, USA), and Life Technologies (Grand Island, NY, USA). TALE and TALEN methods suitable for use in the present disclosure are described in U.S. Patent Application Publication Nos. US 2011/0201118 A1; US 2013/0117869 A1; US 2013/0315884 A1; US 2015/0203871 A1 and US 2016/0120906 A1, the disclosures of which are incorporated by reference herein.

[0189] Non-limiting examples of genes that may be silenced or inhibited by permanently gene-editing synoviocytes via a TALE method are provided in Table 1 and/or genes described in FIG. 20, and/or include IL-1α, IL-1β, IL-4, IL-9, IL-10, IL-13, and TNF-α.

[0190] Non-limiting examples of genes that may be enhanced by permanently gene-editing synoviocytes via a TALE method are provided in Table 1 and/or genes described in FIG. 20, and/or include IL-1α, IL-1β, IL-4, IL-9, IL-10, IL-13, and TNF-α.

[0191] Examples of systems, methods, and compositions for altering the expression of a target gene sequence by a TALE method, and which may be used in accordance with embodiments of the present disclosure, are described in U.S. Pat. No. 8,586,526, which is incorporated by reference herein.

### Zinc Finger Methods

[0192] A pharmaceutical composition for the treatment or prevention of a joint disease or condition comprising a gene-editing system, wherein said gene-editing system targets at least one locus related to joint function, wherein the method further comprises gene-editing at least a portion of joint synoviocytes by a zinc finger or zinc finger nuclease method. According to particular embodiments, the use of a zinc finger method to target at least one locus related to joint function, wherein the gene-editing at least a portion of a joint's synoviocytes. Alternatively, the use of a zinc finger method during to target at least one locus related to joint function, wherein the gene-editing at least a portion of a joint's synoviocytes to cause expression of at least one locus related to joint function genes to be enhanced in at least a portion of the joint synoviocytes.

[0193] An individual zinc finger contains approximately 30 amino acids in a conserved ββα configuration. Several amino acids on the surface of the α-helix typically contact 3 bp in the major groove of DNA, with varying levels of selectivity. Zinc fingers have two protein domains. The first domain is the DNA binding domain, which includes eukaryotic transcription factors and contain the zinc finger. The second domain is the nuclease domain, which includes the FokI restriction enzyme and is responsible for the catalytic cleavage of DNA.

[0194] The DNA-binding domains of individual ZFNs typically contain between three and six individual zinc finger repeats and can each recognize between 9 and 18 base pairs. If the zinc finger domains are specific for their intended target site then even a pair of 3-finger ZFNs that recognize a total of 18 base pairs can, in theory, target a single locus in a mammalian genome. One method to generate new zinc-finger arrays is to combine smaller zinc-finger “modules” of known specificity. The most common modular assembly process involves combining three separate zinc fingers that can each recognize a 3 base pair DNA sequence to generate a 3-finger array that can recognize a 9 base pair target site. Alternatively, selection-based approaches, such as oligomerized pool engineering (OPEN) can be used to select for new zinc-finger arrays from randomized libraries that take into consideration context-dependent interactions between neighboring fingers. Engineered zinc fingers are available commercially; Sangamo Biosciences (Richmond, CA, USA) has developed a propriety platform (CompoZr®) for zinc-finger construction in partnership with Sigma-Aldrich (St. Louis, MO, USA).

[0195] Non-limiting examples of genes that may be silenced or inhibited by permanently gene-editing synoviocytes via a zinc finger method are provided in Table 1 and/or genes described in FIG. 20, and/or may include IL-1α, IL-1β, IL-4, IL-9, IL-10, IL-13, TNF-α. IL-6, IL-8, IL-18, a matrix metalloproteinase (MMP), or a component of the NLRP3 inflammasome. In some embodiments, the component of the NLRP3 inflammasome comprises NLRP3, ASC (apoptosis-associated speck-like protein containing a CARD), caspase-1, and combinations thereof.

[0196] Non-limiting examples of genes that may be enhanced by permanently gene-editing synoviocytes via a zinc finger method are provided in Table, and/or include group comprising IL-1Ra, TIMP-1, TIMP-2, TIMP-3, TIMP-4, and combinations thereof. In an aspect, the disclosure provides compositions for up-regulation of anti-inflammatory cytokines.

[0197] Examples of systems, methods, and compositions for altering the expression of a target gene sequence by a zinc finger method, which may be used in accordance with embodiments of the present disclosure, are described in U.S. Pat. Nos. 6,534,261, 6,607,882, 6,746,838, 6,794,136, 6,824,978, 6,866,997, 6,933,113, 6,979,539, 7,013,219, 7,030,215, 7,220,719, 7,241,573, 7,241,574, 7,585,849, 7,595,376, 6,903,185, and 6,479,626, which are incorporated by reference herein.

[0198] In some aspects, cells may be gene-edited ex vivo, wherein the gene-editing targets one or more anti-inflammatory cytokine locus. In some aspects, the cells are non-synovial cells. In some aspects, the cells are mesenchymal stem cells. In some aspect, the cells are macrophages. In some aspects, the present disclosure provides for a pharmaceutical composition for the treatment or prevention of a joint disease or condition comprising a population of gene-edited cells, wherein said gene-edited cells are edited by a gene-editing system targeting at least one locus related to joint function. In an aspect, the population of gene-edited cells are injected into a synovial joint.

[0199] Other examples of systems, methods, and compositions for altering the expression of a target gene sequence by a zinc finger method, which may be used in accordance with embodiments of the present disclosure, are described in Beane, et al., Mol. Therapy, 2015, 23 1380-1390, the disclosure of which is incorporated by reference herein.

### EXAMPLE EMBODIMENTS

[0200] In some embodiments, the present disclosure provides a pharmaceutical composition for the treatment or prevention of a joint disease or condition, the composition including a therapeutically effective amount of one or more nucleic acids encoding a Clustered Regularly Interspaced Short Palindromic Repeats (CRISPR) gene-editing system. The system includes a CRISPR Associated Protein 9 (Cas9) protein, and at least one guide RNA targeting an IL-1α or IL-1β gene, wherein the target sequence is adjacent to a protospacer adjacent motif (PAM) sequence for the Cas9 protein.

[0201] In some embodiments, the at least one guide RNA targets a human IL-1α gene, and includes a crRNA sequence that is complementary to a target sequence in exon 2 of the IL-1α gene. In some embodiments, the crRNA sequence forms no more than 5 mismatches with the target sequence in exon 2 of the human IL-1α gene. In some embodiments, the crRNA sequence forms no more than 4 mismatches with the target sequence in exon 2 of the human IL-1α gene. In some embodiments, the crRNA sequence forms no more than 3 mismatches with the target sequence in exon 2 of the human IL-1α gene. In some embodiments, the crRNA sequence forms no more than 2 mismatches with the target sequence in exon 2 of the human IL-1α gene. In some embodiments, the crRNA sequence forms no more than 1 mismatch with the target sequence in exon 2 of the human IL-1α gene. In some embodiments, the crRNA sequence forms no mismatches with the target sequence in exon 2 of the human IL-1α gene.

[0202] In some embodiments, the at least one guide RNA targets a human IL-1α gene, and includes a crRNA sequence that is complementary to a target sequence in exon 3 of the IL-1α gene. In some embodiments, the crRNA sequence forms no more than 5 mismatches with the target sequence in exon 3 of the human IL-1α gene. In some embodiments, the crRNA sequence forms no more than 4 mismatches with the target sequence in exon 3 of the human IL-1α gene. In some embodiments, the crRNA sequence forms no more than 3 mismatches with the target sequence in exon 3 of the human IL-1α gene. In some embodiments, the crRNA sequence forms no more than 2 mismatches with the target sequence in exon 3 of the human IL-1α gene. In some embodiments, the crRNA sequence forms no more than 1 mismatch with the target sequence in exon 3 of the human IL-1α gene. In some embodiments, the crRNA sequence forms no mismatches with the target sequence in exon 3 of the human IL-1α gene.

[0203] In some embodiments, the at least one guide RNA targets a human IL-1α gene, and includes a crRNA sequence that is complementary to a target sequence in exon 4 of the IL-1α gene. In some embodiments, the crRNA sequence forms no more than 5 mismatches with the target sequence in exon 4 of the human IL-1α gene. In some embodiments, the crRNA sequence forms no more than 4 mismatches with the target sequence in exon 4 of the human IL-1α gene. In some embodiments, the crRNA sequence forms no more than 3 mismatches with the target sequence in exon 4 of the human IL-1α gene. In some embodiments, the crRNA sequence forms no more than 2 mismatches with the target sequence in exon 4 of the human IL-1α gene. In some embodiments, the crRNA sequence forms no more than 1 mismatch with the target sequence in exon 4 of the human IL-1α gene. In some embodiments, the crRNA sequence forms no mismatches with the target sequence in exon 4 of the human IL-1α gene.

[0204] In some embodiments, the at least one guide RNA targets a human IL-1α gene, and includes a crRNA sequence that is complementary to a target sequence in exon 5 of the IL-1α gene. In some embodiments, the crRNA sequence forms no more than 5 mismatches with the target sequence in exon 5 of the human IL-1α gene. In some embodiments, the crRNA sequence forms no more than 4 mismatches with the target sequence in exon 5 of the human IL-1α gene. In some embodiments, the crRNA sequence forms no more than 3 mismatches with the target sequence in exon 5 of the human IL-1α gene. In some embodiments, the crRNA sequence forms no more than 2 mismatches with the target sequence in exon 5 of the human IL-1α gene. In some embodiments, the crRNA sequence forms no more than 1 mismatch with the target sequence in exon 5 of the human IL-1α gene. In some embodiments, the crRNA sequence forms no mismatches with the target sequence in exon 5 of the human IL-1α gene.

[0205] In some embodiments, the at least one guide RNA targets a human IL-1α gene, and includes a crRNA sequence that is complementary to a target sequence in exon 6 of the IL-1α gene. In some embodiments, the crRNA sequence forms no more than 5 mismatches with the target sequence in exon 6 of the human IL-1α gene. In some embodiments, the crRNA sequence forms no more than 4 mismatches with the target sequence in exon 6 of the human IL-1α gene. In some embodiments, the crRNA sequence forms no more than 3 mismatches with the target sequence in exon 6 of the human IL-1α gene. In some embodiments, the crRNA sequence forms no more than 2 mismatches with the target sequence in exon 6 of the human IL-1α gene. In some embodiments, the crRNA sequence forms no more than 1 mismatch with the target sequence in exon 6 of the human IL-1α gene. In some embodiments, the crRNA sequence forms no mismatches with the target sequence in exon 6 of the human IL-1α gene.

[0206] In some embodiments, the at least one guide RNA targets a human IL-1α gene, and includes a crRNA sequence that is complementary to a target sequence in exon 7 of the IL-1α gene. In some embodiments, the crRNA sequence forms no more than 5 mismatches with the target sequence in exon 7 of the human IL-1α gene. In some embodiments, the crRNA sequence forms no more than 4 mismatches with the target sequence in exon 7 of the human IL-1α gene. In some embodiments, the crRNA sequence forms no more than 3 mismatches with the target sequence in exon 7 of the human IL-1α gene. In some embodiments, the crRNA sequence forms no more than 2 mismatches with the target sequence in exon 7 of the human IL-1α gene. In some embodiments, the crRNA sequence forms no more than 1 mismatch with the target sequence in exon 7 of the human IL-1α gene. In some embodiments, the crRNA sequence forms no mismatches with the target sequence in exon 7 of the human IL-1α gene.

[0207] In some embodiments, the at least one guide RNA targets a human IL-1α gene, and includes a crRNA sequence that is complementary to a target sequence in exon 2 or exon 3 of the IL-1α gene. In some embodiments, the at least one guide RNA targets a human IL-1α gene, and includes a crRNA sequence that is complementary to a target sequence in exon 2 or exon 4 of the IL-1α gene. In some embodiments, the at least one guide RNA targets a human IL-1α gene, and includes a crRNA sequence that is complementary to a target sequence in exon 2 or exon 5 of the IL-1α gene. In some embodiments, the at least one guide RNA targets a human IL-1α gene, and includes a crRNA sequence that is complementary to a target sequence in exon 2 or exon 6 of the IL-1α gene. In some embodiments, the at least one guide RNA targets a human IL-1α gene, and includes a crRNA sequence that is complementary to a target sequence in exon 2 or exon 7 of the IL-1α gene.

[0208] In some embodiments, the at least one guide RNA targets a human IL-1α gene, and includes a crRNA sequence that is complementary to a target sequence in exon 3 or exon 4 of the IL-1α gene. In some embodiments, the at least one guide RNA targets a human IL-1α gene, and includes a crRNA sequence that is complementary to a target sequence in exon 3 or exon 5 of the IL-1α gene. In some embodiments, the at least one guide RNA targets a human IL-1α gene, and includes a crRNA sequence that is complementary to a target sequence in exon 3 or exon 6 of the IL-1α gene. In some embodiments, the at least one guide RNA targets a human IL-1α gene, and includes a crRNA sequence that is complementary to a target sequence in exon 3 or exon 7 of the IL-1α gene.

[0209] In some embodiments, the at least one guide RNA targets a human IL-1α gene, and includes a crRNA sequence that is complementary to a target sequence in exon 4 or exon 5 of the IL-1α gene. In some embodiments, the at least one guide RNA targets a human IL-1α gene, and includes a crRNA sequence that is complementary to a target sequence in exon 4 or exon 6 of the IL-1α gene. In some embodiments, the at least one guide RNA targets a human IL-1α gene, and includes a crRNA sequence that is complementary to a target sequence in exon 4 or exon 7 of the IL-1α gene.

[0210] In some embodiments, the at least one guide RNA targets a human IL-1α gene, and includes a crRNA sequence that is complementary to a target sequence in exon 5 or exon 6 of the IL-1α gene. In some embodiments, the at least one guide RNA targets a human IL-1α gene, and includes a crRNA sequence that is complementary to a target sequence in exon 5 or exon 7 of the IL-1α gene. In some embodiments, the at least one guide RNA targets a human IL-1α gene, and includes a crRNA sequence that is complementary to a target sequence in exon 6 or exon 7 of the IL-1α gene.

[0211] In some embodiments, the at least one guide RNA targets a human IL-1α gene, and includes a crRNA sequence that is complementary to a target sequence in exon 2, exon 3, or exon 4 of the IL-1α gene. In some embodiments, the at least one guide RNA targets a human IL-1α gene, and includes a crRNA sequence that is complementary to a target sequence in exon 2, exon 3, or exon 5 of the IL-1α gene. In some embodiments, the at least one guide RNA targets a human IL-1α gene, and includes a crRNA sequence that is complementary to a target sequence in exon 2, exon 3, or exon 6 of the IL-1α gene. In some embodiments, the at least one guide RNA targets a human IL-1α gene, and includes a crRNA sequence that is complementary to a target sequence in exon 2, exon 3, or exon 7 of the IL-1α gene. In some embodiments, the at least one guide RNA targets a human IL-1α gene, and includes a crRNA sequence that is complementary to a target sequence in exon 2, exon 4, or exon 5 of the IL-1α gene. In some embodiments, the at least one guide RNA targets a human IL-1α gene, and includes a crRNA sequence that is complementary to a target sequence in exon 2, exon 4, or exon 6 of the IL-1α gene. In some embodiments, the at least one guide RNA targets a human IL-1α gene, and includes a crRNA sequence that is complementary to a target sequence in exon 2, exon 4, or exon 7 of the IL-1α gene. In some embodiments, the at least one guide RNA targets a human IL-1α gene, and includes a crRNA sequence that is complementary to a target sequence in exon 2, exon 5, or exon 6 of the IL-1α gene. In some embodiments, the at least one guide RNA targets a human IL-1α gene, and includes a crRNA sequence that is complementary to a target sequence in exon 2, exon 5, or exon 7 of the IL-1α gene. In some embodiments, the at least one guide RNA targets a human IL-1α gene, and includes a crRNA sequence that is complementary to a target sequence in exon 2, exon 6, or exon 7 of the IL-1α gene.

[0212] In some embodiments, the at least one guide RNA targets a human IL-1α gene, and includes a crRNA sequence that is complementary to a target sequence in exon 3, exon 4, or exon 5 of the IL-1α gene. In some embodiments, the at least one guide RNA targets a human IL-1α gene, and includes a crRNA sequence that is complementary to a target sequence in exon 3, exon 4, or exon 6 of the IL-1α gene. In some embodiments, the at least one guide RNA targets a human IL-1α gene, and includes a crRNA sequence that is complementary to a target sequence in exon 3, exon 4, or exon 7 of the IL-1α gene. In some embodiments, the at least one guide RNA targets a human IL-1α gene, and includes a crRNA sequence that is complementary to a target sequence in exon 3, exon 5, or exon 6 of the IL-1α gene. In some embodiments, the at least one guide RNA targets a human IL-1α gene, and includes a crRNA sequence that is complementary to a target sequence in exon 3, exon 5, or exon 7 of the IL-1α gene. In some embodiments, the at least one guide RNA targets a human IL-1α gene, and includes a crRNA sequence that is complementary to a target sequence in exon 3, exon 6, or exon 7 of the IL-1α gene.

[0213] In some embodiments, the at least one guide RNA targets a human IL-1α gene, and includes a crRNA sequence that is complementary to a target sequence in exon 4, exon 5, or exon 6 of the IL-1α gene. In some embodiments, the at least one guide RNA targets a human IL-1α gene, and includes a crRNA sequence that is complementary to a target sequence in exon 4, exon 5, or exon 7 of the IL-1α gene. In some embodiments, the at least one guide RNA targets a human IL-1α gene, and includes a crRNA sequence that is complementary to a target sequence in exon 4, exon 6, or exon 7 of the IL-1α gene. In some embodiments, the at least one guide RNA targets a human IL-1α gene, and includes a crRNA sequence that is complementary to a target sequence in exon 5, exon 6, or exon 7 of the IL-1α gene.

[0214] In some embodiments, the at least one guide RNA targets a human IL-1α gene, and includes a crRNA sequence that is complementary to a target sequence in exon 2, exon 3, exon 4, or exon 5 of the IL-1α gene. In some embodiments, the at least one guide RNA targets a human IL-1α gene, and includes a crRNA sequence that is complementary to a target sequence in exon 2, exon 3, exon 4, or exon 6 of the IL-1α gene. In some embodiments, the at least one guide RNA targets a human IL-1α gene, and includes a crRNA sequence that is complementary to a target sequence in exon 2, exon 3, exon 4, or exon 7 of the IL-1α gene. In some embodiments, the at least one guide RNA targets a human IL-1α gene, and includes a crRNA sequence that is complementary to a target sequence in exon 2, exon 4, exon 5, or exon 6 of the IL-1α gene. In some embodiments, the at least one guide RNA targets a human IL-1α gene, and includes a crRNA sequence that is complementary to a target sequence in exon 2, exon 4, exon 5, or exon 7 of the IL-1α gene. In some embodiments, the at least one guide RNA targets a human IL-1α gene, and includes a crRNA sequence that is complementary to a target sequence in exon 2, exon 4, exon 6, or exon 7 of the IL-1α gene. In some embodiments, the at least one guide RNA targets a human IL-1α gene, and includes a crRNA sequence that is complementary to a target sequence in exon 2, exon 5, exon 6, or exon 7 of the IL-1α gene.

[0215] In some embodiments, the at least one guide RNA targets a human IL-1α gene, and includes a crRNA sequence that is complementary to a target sequence in exon 3, exon 4, exon 5, or exon 6 of the IL-1α gene. In some embodiments, the at least one guide RNA targets a human IL-1α gene, and includes a crRNA sequence that is complementary to a target sequence in exon 3, exon 4, exon 5, or exon 7 of the IL-1α gene. In some embodiments, the at least one guide RNA targets a human IL-1α gene, and includes a crRNA sequence that is complementary to a target sequence in exon 3, exon 4, exon 6, or exon 7 of the IL-1α gene. In some embodiments, the at least one guide RNA targets a human IL-1α gene, and includes a crRNA sequence that is complementary to a target sequence in exon 3, exon 5, exon 6, or exon 7 of the IL-1α gene. In some embodiments, the at least one guide RNA targets a human IL-1α gene, and includes a crRNA sequence that is complementary to a target sequence in exon 4, exon 5, exon 6, or exon 7 of the IL-1α gene.

[0216] In some embodiments, the at least one guide RNA targets a human IL-1α gene, and includes a crRNA sequence that is complementary to a target sequence in exon 2, exon 3, exon 4, exon 5, or exon 6 of the IL-1α gene. In some embodiments, the at least one guide RNA targets a human IL-1α gene, and includes a crRNA sequence that is complementary to a target sequence in exon 2, exon 3, exon 4, exon 5, or exon 7 of the IL-1α gene. In some embodiments, the at least one guide RNA targets a human IL-1α gene, and includes a crRNA sequence that is complementary to a target sequence in exon 3, exon 4, exon 5, exon 6, or exon 7 of the IL-1α gene. In some embodiments, the at least one guide RNA targets a human IL-1α gene, and includes a crRNA sequence that is complementary to a target sequence in exon 2, exon 4, exon 5, exon 6, or exon 7 of the IL-1α gene. In some embodiments, the at least one guide RNA targets a human IL-1α gene, and includes a crRNA sequence that is complementary to a target sequence in exon 2, exon 3, exon 5, exon 6, or exon 6 of the IL-1α gene. In some embodiments, the at least one guide RNA targets a human IL-1α gene, and includes a crRNA sequence that is complementary to a target sequence in exon 2, exon 3, exon 4, exon 6, or exon 7 of the IL-1α gene. In some embodiments, the at least one guide RNA targets a human IL-1α gene, and includes a crRNA sequence that is complementary to a target sequence in exon 2, exon 3, exon 4, exon 5, exon 6, or exon 7 of the IL-1α gene.

[0217] In some embodiments, the at least one guide RNA targets a human IL-1α gene, and includes a crRNA sequence having at least 75% identity to a sequence selected from the group consisting of SEQ ID NOs: 298-387. In some embodiments, the crRNA sequence has at least 80% identity to a sequence selected from the group consisting of SEQ ID NOs: 298-387. In some embodiments, the crRNA sequence has at least 85% identity to a sequence selected from the group consisting of SEQ ID NOs: 298-387. In some embodiments, the crRNA sequence has at least 90% identity to a sequence selected from the group consisting of SEQ ID NOs: 298-387. In some embodiments, the crRNA sequence has at least 95% identity to a sequence selected from the group consisting of SEQ ID NOs: 298-387. In some embodiments, the crRNA sequence is selected from the group consisting of SEQ ID NOs: 298-387.

[0218] In some embodiments, the at least one guide RNA targets a human IL-1α gene, and includes a crRNA sequence having at least 75% identity to SEQ ID NO:301. In some embodiments, the crRNA sequence has at least 80% identity to SEQ ID NO:301. In some embodiments, the crRNA sequence has at least 85% identity to SEQ ID NO:301. In some embodiments, the crRNA sequence has at least 90% identity to SEQ ID NO:301. In some embodiments, the crRNA sequence has at least 95% identity to SEQ ID NO:301. In some embodiments, the crRNA sequence is SEQ ID NO:301.

[0219] In some embodiments, the at least one guide RNA targets a human IL-1α gene, and includes a crRNA sequence having at least 75% identity to SEQ ID NO:309. In some embodiments, the crRNA sequence has at least 80% identity to SEQ ID NO:309. In some embodiments, the crRNA sequence has at least 85% identity to SEQ ID NO:309. In some embodiments, the crRNA sequence has at least 90% identity to SEQ ID NO:309. In some embodiments, the crRNA sequence has at least 95% identity to SEQ ID NO:309. In some embodiments, the crRNA sequence is SEQ ID NO:309.

[0220] In some embodiments, the at least one guide RNA targets a human IL-1β gene, and includes a crRNA sequence having at least 75% identity to a sequence selected from the group consisting of SEQ ID NOs: 388-496. In some embodiments, the crRNA sequence has at least 80% identity to a sequence selected from the group consisting of SEQ ID NOs: 388-496. In some embodiments, the crRNA sequence has at least 85% identity to a sequence selected from the group consisting of SEQ ID NOs: 388-496. In some embodiments, the crRNA sequence has at least 90% identity to a sequence selected from the group consisting of SEQ ID NOs: 388-496. In some embodiments, the crRNA sequence has at least 95% identity to a sequence selected from the group consisting of SEQ ID NOs: 388-496. In some embodiments, the crRNA sequence is selected from the group consisting of SEQ ID NOs: 388-496.

[0221] In some embodiments, the at least one guide RNA targets a human IL-1β gene, and includes a crRNA sequence that is complementary to a target sequence in exon 2 of the IL-1β gene. In some embodiments, the crRNA sequence forms no more than 5 mismatches with the target sequence in exon 2 of the human IL-1β gene. In some embodiments, the crRNA sequence forms no more than 4 mismatches with the target sequence in exon 2 of the human IL-1β gene. In some embodiments, the crRNA sequence forms no more than 3 mismatches with the target sequence in exon 2 of the human IL-1β gene. In some embodiments, the crRNA sequence forms no more than 2 mismatches with the target sequence in exon 2 of the human IL-1β gene. In some embodiments, the crRNA sequence forms no more than 1 mismatch with the target sequence in exon 2 of the human IL-1β gene. In some embodiments, the crRNA sequence forms no mismatches with the target sequence in exon 2 of the human IL-1β gene.

[0222] In some embodiments, the at least one guide RNA targets a human IL-1β gene, and includes a crRNA sequence that is complementary to a target sequence in exon 3 of the IL-1β gene. In some embodiments, the crRNA sequence forms no more than 5 mismatches with the target sequence in exon 3 of the human IL-1β gene. In some embodiments, the crRNA sequence forms no more than 4 mismatches with the target sequence in exon 3 of the human IL-1β gene. In some embodiments, the crRNA sequence forms no more than 3 mismatches with the target sequence in exon 3 of the human IL-1β gene. In some embodiments, the crRNA sequence forms no more than 2 mismatches with the target sequence in exon 3 of the human IL-1β gene. In some embodiments, the crRNA sequence forms no more than 1 mismatch with the target sequence in exon 3 of the human IL-1β gene. In some embodiments, the crRNA sequence forms no mismatches with the target sequence in exon 3 of the human IL-1β gene.

[0223] In some embodiments, the at least one guide RNA targets a human IL-1β gene, and includes a crRNA sequence that is complementary to a target sequence in exon 4 of the IL-1β gene. In some embodiments, the crRNA sequence forms no more than 5 mismatches with the target sequence in exon 4 of the human IL-1β gene. In some embodiments, the crRNA sequence forms no more than 4 mismatches with the target sequence in exon 4 of the human IL-1β gene. In some embodiments, the crRNA sequence forms no more than 3 mismatches with the target sequence in exon 4 of the human IL-1β gene. In some embodiments, the crRNA sequence forms no more than 2 mismatches with the target sequence in exon 4 of the human IL-1β gene. In some embodiments, the crRNA sequence forms no more than 1 mismatch with the target sequence in exon 4 of the human IL-1β gene. In some embodiments, the crRNA sequence forms no mismatches with the target sequence in exon 4 of the human IL-1β gene.

[0224] In some embodiments, the at least one guide RNA targets a human IL-1β gene, and includes a crRNA sequence that is complementary to a target sequence in exon 5 of the IL-1β gene. In some embodiments, the crRNA sequence forms no more than 5 mismatches with the target sequence in exon 5 of the human IL-1β gene. In some embodiments, the crRNA sequence forms no more than 4 mismatches with the target sequence in exon 5 of the human IL-1β gene. In some embodiments, the crRNA sequence forms no more than 3 mismatches with the target sequence in exon 5 of the human IL-1β gene. In some embodiments, the crRNA sequence forms no more than 2 mismatches with the target sequence in exon 5 of the human IL-1β gene. In some embodiments, the crRNA sequence forms no more than 1 mismatch with the target sequence in exon 5 of the human IL-1β gene. In some embodiments, the crRNA sequence forms no mismatches with the target sequence in exon 5 of the human IL-1β gene.

[0225] In some embodiments, the at least one guide RNA targets a human IL-1β gene, and includes a crRNA sequence that is complementary to a target sequence in exon 6 of the IL-1β gene. In some embodiments, the crRNA sequence forms no more than 5 mismatches with the target sequence in exon 6 of the human IL-1β gene. In some embodiments, the crRNA sequence forms no more than 4 mismatches with the target sequence in exon 6 of the human IL-1β gene. In some embodiments, the crRNA sequence forms no more than 3 mismatches with the target sequence in exon 6 of the human IL-1β gene. In some embodiments, the crRNA sequence forms no more than 2 mismatches with the target sequence in exon 6 of the human IL-1β gene. In some embodiments, the crRNA sequence forms no more than 1 mismatch with the target sequence in exon 6 of the human IL-1β gene. In some embodiments, the crRNA sequence forms no mismatches with the target sequence in exon 6 of the human IL-1β gene.

[0226] In some embodiments, the at least one guide RNA targets a human IL-1β gene, and includes a crRNA sequence that is complementary to a target sequence in exon 7 of the IL-1β gene. In some embodiments, the crRNA sequence forms no more than 5 mismatches with the target sequence in exon 7 of the human IL-1β gene. In some embodiments, the crRNA sequence forms no more than 4 mismatches with the target sequence in exon 7 of the human IL-1β gene. In some embodiments, the crRNA sequence forms no more than 3 mismatches with the target sequence in exon 7 of the human IL-1β gene. In some embodiments, the crRNA sequence forms no more than 2 mismatches with the target sequence in exon 7 of the human IL-1β gene. In some embodiments, the crRNA sequence forms no more than 1 mismatch with the target sequence in exon 7 of the human IL-1β gene. In some embodiments, the crRNA sequence forms no mismatches with the target sequence in exon 7 of the human IL-1β gene.

[0227] In some embodiments, the at least one guide RNA targets a human IL-1β gene, and includes a crRNA sequence that is complementary to a target sequence in exon 2 or exon 3 of the IL-1β gene. In some embodiments, the at least one guide RNA targets a human IL-1β gene, and includes a crRNA sequence that is complementary to a target sequence in exon 2 or exon 4 of the IL-1β gene. In some embodiments, the at least one guide RNA targets a human IL-1β gene, and includes a crRNA sequence that is complementary to a target sequence in exon 2 or exon 5 of the IL-1β gene. In some embodiments, the at least one guide RNA targets a human IL-1β gene, and includes a crRNA sequence that is complementary to a target sequence in exon 2 or exon 6 of the IL-1β gene. In some embodiments, the at least one guide RNA targets a human IL-1β gene, and includes a crRNA sequence that is complementary to a target sequence in exon 2 or exon 7 of the IL-1β gene.

[0228] In some embodiments, the at least one guide RNA targets a human IL-1β gene, and includes a crRNA sequence that is complementary to a target sequence in exon 3 or exon 4 of the IL-1β gene. In some embodiments, the at least one guide RNA targets a human IL-1β gene, and includes a crRNA sequence that is complementary to a target sequence in exon 3 or exon 5 of the IL-1β gene. In some embodiments, the at least one guide RNA targets a human IL-1β gene, and includes a crRNA sequence that is complementary to a target sequence in exon 3 or exon 6 of the IL-1β gene. In some embodiments, the at least one guide RNA targets a human IL-1β gene, and includes a crRNA sequence that is complementary to a target sequence in exon 3 or exon 7 of the IL-1β gene.

[0229] In some embodiments, the at least one guide RNA targets a human IL-1β gene, and includes a crRNA sequence that is complementary to a target sequence in exon 4 or exon 5 of the IL-1β gene. In some embodiments, the at least one guide RNA targets a human IL-1β gene, and includes a crRNA sequence that is complementary to a target sequence in exon 4 or exon 6 of the IL-1β gene. In some embodiments, the at least one guide RNA targets a human IL-1β gene, and includes a crRNA sequence that is complementary to a target sequence in exon 4 or exon 7 of the IL-1β gene.

[0230] In some embodiments, the at least one guide RNA targets a human IL-1β gene, and includes a crRNA sequence that is complementary to a target sequence in exon 5 or exon 6 of the IL-1β gene. In some embodiments, the at least one guide RNA targets a human IL-1β gene, and includes a crRNA sequence that is complementary to a target sequence in exon 5 or exon 7 of the IL-1β gene. In some embodiments, the at least one guide RNA targets a human IL-1β gene, and includes a crRNA sequence that is complementary to a target sequence in exon 6 or exon 7 of the IL-1β gene.

[0231] In some embodiments, the at least one guide RNA targets a human IL-1β gene, and includes a crRNA sequence that is complementary to a target sequence in exon 2, exon 3, or exon 4 of the IL-1β gene. In some embodiments, the at least one guide RNA targets a human IL-1β gene, and includes a crRNA sequence that is complementary to a target sequence in exon 2, exon 3, or exon 5 of the IL-1β gene. In some embodiments, the at least one guide RNA targets a human IL-1β gene, and includes a crRNA sequence that is complementary to a target sequence in exon 2, exon 3, or exon 6 of the IL-1β gene. In some embodiments, the at least one guide RNA targets a human IL-1β gene, and includes a crRNA sequence that is complementary to a target sequence in exon 2, exon 3, or exon 7 of the IL-1β gene. In some embodiments, the at least one guide RNA targets a human IL-1β gene, and includes a crRNA sequence that is complementary to a target sequence in exon 2, exon 4, or exon 5 of the IL-1β gene. In some embodiments, the at least one guide RNA targets a human IL-1β gene, and includes a crRNA sequence that is complementary to a target sequence in exon 2, exon 4, or exon 6 of the IL-1β gene. In some embodiments, the at least one guide RNA targets a human IL-1β gene, and includes a crRNA sequence that is complementary to a target sequence in exon 2, exon 4, or exon 7 of the IL-1β gene. In some embodiments, the at least one guide RNA targets a human IL-1β gene, and includes a crRNA sequence that is complementary to a target sequence in exon 2, exon 5, or exon 6 of the IL-1β gene. In some embodiments, the at least one guide RNA targets a human IL-1β gene, and includes a crRNA sequence that is complementary to a target sequence in exon 2, exon 5, or exon 7 of the IL-1β gene. In some embodiments, the at least one guide RNA targets a human IL-1β gene, and includes a crRNA sequence that is complementary to a target sequence in exon 2, exon 6, or exon 7 of the IL-1β gene.

[0232] In some embodiments, the at least one guide RNA targets a human IL-1β gene, and includes a crRNA sequence that is complementary to a target sequence in exon 3, exon 4, or exon 5 of the IL-1β gene. In some embodiments, the at least one guide RNA targets a human IL-1β gene, and includes a crRNA sequence that is complementary to a target sequence in exon 3, exon 4, or exon 6 of the IL-1β gene. In some embodiments, the at least one guide RNA targets a human IL-1β gene, and includes a crRNA sequence that is complementary to a target sequence in exon 3, exon 4, or exon 7 of the IL-1β gene. In some embodiments, the at least one guide RNA targets a human IL-1β gene, and includes a crRNA sequence that is complementary to a target sequence in exon 3, exon 5, or exon 6 of the IL-1β gene. In some embodiments, the at least one guide RNA targets a human IL-1β gene, and includes a crRNA sequence that is complementary to a target sequence in exon 3, exon 5, or exon 7 of the IL-1β gene. In some embodiments, the at least one guide RNA targets a human IL-1β gene, and includes a crRNA sequence that is complementary to a target sequence in exon 3, exon 6, or exon 7 of the IL-1β gene.

[0233] In some embodiments, the at least one guide RNA targets a human IL-1β gene, and includes a crRNA sequence that is complementary to a target sequence in exon 4, exon 5, or exon 6 of the IL-1β gene. In some embodiments, the at least one guide RNA targets a human IL-1β gene, and includes a crRNA sequence that is complementary to a target sequence in exon 4, exon 5, or exon 7 of the IL-1β gene. In some embodiments, the at least one guide RNA targets a human IL-1β gene, and includes a crRNA sequence that is complementary to a target sequence in exon 4, exon 6, or exon 7 of the IL-1β gene. In some embodiments, the at least one guide RNA targets a human IL-1β gene, and includes a crRNA sequence that is complementary to a target sequence in exon 5, exon 6, or exon 7 of the IL-1β gene.

[0234] In some embodiments, the at least one guide RNA targets a human IL-1β gene, and includes a crRNA sequence that is complementary to a target sequence in exon 2, exon 3, exon 4, or exon 5 of the IL-1β gene. In some embodiments, the at least one guide RNA targets a human IL-1β gene, and includes a crRNA sequence that is complementary to a target sequence in exon 2, exon 3, exon 4, or exon 6 of the IL-1β gene. In some embodiments, the at least one guide RNA targets a human IL-1β gene, and includes a crRNA sequence that is complementary to a target sequence in exon 2, exon 3, exon 4, or exon 7 of the IL-1β gene. In some embodiments, the at least one guide RNA targets a human IL-1β gene, and includes a crRNA sequence that is complementary to a target sequence in exon 2, exon 4, exon 5, or exon 6 of the IL-1β gene. In some embodiments, the at least one guide RNA targets a human IL-1β gene, and includes a crRNA sequence that is complementary to a target sequence in exon 2, exon 4, exon 5, or exon 7 of the IL-1β gene. In some embodiments, the at least one guide RNA targets a human IL-1β gene, and includes a crRNA sequence that is complementary to a target sequence in exon 2, exon 4, exon 6, or exon 7 of the IL-1β gene. In some embodiments, the at least one guide RNA targets a human IL-1β gene, and includes a crRNA sequence that is complementary to a target sequence in exon 2, exon 5, exon 6, or exon 7 of the IL-1β gene.

[0235] In some embodiments, the at least one guide RNA targets a human IL-1β gene, and includes a crRNA sequence that is complementary to a target sequence in exon 3, exon 4, exon 5, or exon 6 of the IL-1β gene. In some embodiments, the at least one guide RNA targets a human IL-1β gene, and includes a crRNA sequence that is complementary to a target sequence in exon 3, exon 4, exon 5, or exon 7 of the IL-1β gene. In some embodiments, the at least one guide RNA targets a human IL-1β gene, and includes a crRNA sequence that is complementary to a target sequence in exon 3, exon 4, exon 6, or exon 7 of the IL-1β gene. In some embodiments, the at least one guide RNA targets a human IL-1β gene, and includes a crRNA sequence that is complementary to a target sequence in exon 3, exon 5, exon 6, or exon 7 of the IL-1β gene. In some embodiments, the at least one guide RNA targets a human IL-1β gene, and includes a crRNA sequence that is complementary to a target sequence in exon 4, exon 5, exon 6, or exon 7 of the IL-1β gene.

[0236] In some embodiments, the at least one guide RNA targets a human IL-1β gene, and includes a crRNA sequence that is complementary to a target sequence in exon 2, exon 3, exon 4, exon 5, or exon 6 of the IL-1β gene. In some embodiments, the at least one guide RNA targets a human IL-1β gene, and includes a crRNA sequence that is complementary to a target sequence in exon 2, exon 3, exon 4, exon 5, or exon 7 of the IL-1β gene. In some embodiments, the at least one guide RNA targets a human IL-1β gene, and includes a crRNA sequence that is complementary to a target sequence in exon 3, exon 4, exon 5, exon 6, or exon 7 of the IL-1β gene. In some embodiments, the at least one guide RNA targets a human IL-1β gene, and includes a crRNA sequence that is complementary to a target sequence in exon 2, exon 4, exon 5, exon 6, or exon 7 of the IL-1β gene. In some embodiments, the at least one guide RNA targets a human IL-1β gene, and includes a crRNA sequence that is complementary to a target sequence in exon 2, exon 3, exon 5, exon 6, or exon 6 of the IL-1β gene. In some embodiments, the at least one guide RNA targets a human IL-1β gene, and includes a crRNA sequence that is complementary to a target sequence in exon 2, exon 3, exon 4, exon 6, or exon 7 of the IL-1β gene. In some embodiments, the at least one guide RNA targets a human IL-1β gene, and includes a crRNA sequence that is complementary to a target sequence in exon 2, exon 3, exon 4, exon 5, exon 6, or exon 7 of the IL-1β gene.

[0237] In some embodiments, the at least one guide RNA targets a human IL-1β gene, and includes a crRNA sequence having at least 75% identity to SEQ ID NO:462. In some embodiments, the crRNA sequence has at least 80% identity to SEQ ID NO:462. In some embodiments, the crRNA sequence has at least 85% identity to SEQ ID NO:462. In some embodiments, the crRNA sequence has at least 90% identity to SEQ ID NO:462. In some embodiments, the crRNA sequence has at least 95% identity to SEQ ID NO:462. In some embodiments, the crRNA sequence is SEQ ID NO:462.

[0238] In some embodiments, the at least one guide RNA targets a human IL-1β gene, and includes a crRNA sequence having at least 75% identity to SEQ ID NO:391. In some embodiments, the crRNA sequence has at least 80% identity to SEQ ID NO:391. In some embodiments, the crRNA sequence has at least 85% identity to SEQ ID NO:391. In some embodiments, the crRNA sequence has at least 90% identity to SEQ ID NO:391. In some embodiments, the crRNA sequence has at least 95% identity to SEQ ID NO:391. In some embodiments, the crRNA sequence is SEQ ID NO:391.

[0239] In some embodiments, the at least one guide RNA targets a human IL-1β gene, and includes a crRNA sequence having at least 75% identity to SEQ ID NO:393. In some embodiments, the crRNA sequence has at least 80% identity to SEQ ID NO:393. In some embodiments, the crRNA sequence has at least 85% identity to SEQ ID NO:393. In some embodiments, the crRNA sequence has at least 90% identity to SEQ ID NO:393. In some embodiments, the crRNA sequence has at least 95% identity to SEQ ID NO:393. In some embodiments, the crRNA sequence is SEQ ID NO:393.

[0240] In some embodiments, the at least one guide RNA targets a human IL-1β gene, and includes a crRNA sequence having at least 75% identity to SEQ ID NO:388. In some embodiments, the crRNA sequence has at least 80% identity to SEQ ID NO:388. In some embodiments, the crRNA sequence has at least 85% identity to SEQ ID NO:388. In some embodiments, the crRNA sequence has at least 90% identity to SEQ ID NO:388. In some embodiments, the crRNA sequence has at least 95% identity to SEQ ID NO:388. In some embodiments, the crRNA sequence is SEQ ID NO:388.

[0241] In some embodiments, the at least one guide RNA targets a human IL-1β gene, and includes a crRNA sequence having at least 75% identity to SEQ ID NO:389. In some embodiments, the crRNA sequence has at least 80% identity to SEQ ID NO:389. In some embodiments, the crRNA sequence has at least 85% identity to SEQ ID NO:389. In some embodiments, the crRNA sequence has at least 90% identity to SEQ ID NO:389. In some embodiments, the crRNA sequence has at least 95% identity to SEQ ID NO:389. In some embodiments, the crRNA sequence is SEQ ID NO:389.

[0242] In some embodiments, the at least one guide RNA targets a canine IL-1α gene, and includes a crRNA sequence having at least 75% identity to a sequence selected from the group consisting of SEQ ID NOs: 522-590. In some embodiments, the crRNA sequence has at least 80% identity to a sequence selected from the group consisting of SEQ ID NOs: 522-590. In some embodiments, the crRNA sequence has at least 85% identity to a sequence selected from the group consisting of SEQ ID NOs: 522-590. In some embodiments, the crRNA sequence has at least 90% identity to a sequence selected from the group consisting of SEQ ID NOs: 522-590. In some embodiments, the crRNA sequence has at least 95% identity to a sequence selected from the group consisting of SEQ ID NOs: 522-590. In some embodiments, the crRNA sequence is selected from the group consisting of SEQ ID NOs: 522-590.

[0243] In some embodiments, the at least one guide RNA targets a canine IL-1α gene, and includes a crRNA sequence having at least 75% identity to SEQ ID NO:552. In some embodiments, the crRNA sequence has at least 80% identity to SEQ ID NO:552. In some embodiments, the crRNA sequence has at least 85% identity to SEQ ID NO:552. In some embodiments, the crRNA sequence has at least 90% identity to SEQ ID NO:552. In some embodiments, the crRNA sequence has at least 95% identity to SEQ ID NO:552. In some embodiments, the crRNA sequence is SEQ ID NO:552.

[0244] In some embodiments, the at least one guide RNA targets a canine IL-1α gene, and includes a crRNA sequence having at least 75% identity to SEQ ID NO:554. In some embodiments, the crRNA sequence has at least 80% identity to SEQ ID NO:554. In some embodiments, the crRNA sequence has at least 85% identity to SEQ ID NO:554. In some embodiments, the crRNA sequence has at least 90% identity to SEQ ID NO:554. In some embodiments, the crRNA sequence has at least 95% identity to SEQ ID NO:554. In some embodiments, the crRNA sequence is SEQ ID NO:554.

[0245] In some embodiments, the at least one guide RNA targets a canine IL-1α gene, and includes a crRNA sequence having at least 75% identity to SEQ ID NO:578. In some embodiments, the crRNA sequence has at least 80% identity to SEQ ID NO:578. In some embodiments, the crRNA sequence has at least 85% identity to SEQ ID NO:578. In some embodiments, the crRNA sequence has at least 90% identity to SEQ ID NO:578. In some embodiments, the crRNA sequence has at least 95% identity to SEQ ID NO:578. In some embodiments, the crRNA sequence is SEQ ID NO:578.

[0246] In some embodiments, the at least one guide RNA targets a canine IL-1α gene, and includes a crRNA sequence having at least 75% identity to SEQ ID NO:579. In some embodiments, the crRNA sequence has at least 80% identity to SEQ ID NO:579. In some embodiments, the crRNA sequence has at least 85% identity to SEQ ID NO:579. In some embodiments, the crRNA sequence has at least 90% identity to SEQ ID NO:579. In some embodiments, the crRNA sequence has at least 95% identity to SEQ ID NO:579. In some embodiments, the crRNA sequence is SEQ ID NO:579.

[0247] In some embodiments, the at least one guide RNA targets a canine IL-1β gene, and includes a crRNA sequence having at least 75% identity to a sequence selected from the group consisting of SEQ ID NOs: 497-551. In some embodiments, the crRNA sequence has at least 80% identity to a sequence selected from the group consisting of SEQ ID NOs: 497-551. In some embodiments, the crRNA sequence has at least 85% identity to a sequence selected from the group consisting of SEQ ID NOs: 497-551. In some embodiments, the crRNA sequence has at least 90% identity to a sequence selected from the group consisting of SEQ ID NOs: 497-551. In some embodiments, the crRNA sequence has at least 95% identity to a sequence selected from the group consisting of SEQ ID NOs: 497-551. In some embodiments, the crRNA sequence is selected from the group consisting of SEQ ID NOs: 497-551.

[0248] In some embodiments, the at least one guide RNA targets a canine IL-1β gene, and includes a crRNA sequence having at least 75% identity to SEQ ID NO:498. In some embodiments, the crRNA sequence has at least 80% identity to SEQ ID NO:498. In some embodiments, the crRNA sequence has at least 85% identity to SEQ ID NO:498. In some embodiments, the crRNA sequence has at least 90% identity to SEQ ID NO:498. In some embodiments, the crRNA sequence has at least 95% identity to SEQ ID NO:498. In some embodiments, the crRNA sequence is SEQ ID NO:498.

[0249] In some embodiments, the at least one guide RNA targets a canine IL-1β gene, and includes a crRNA sequence having at least 75% identity to SEQ ID NO:506. In some embodiments, the crRNA sequence has at least 80% identity to SEQ ID NO:506. In some embodiments, the crRNA sequence has at least 85% identity to SEQ ID NO:506. In some embodiments, the crRNA sequence has at least 90% identity to SEQ ID NO:506. In some embodiments, the crRNA sequence has at least 95% identity to SEQ ID NO:506. In some embodiments, the crRNA sequence is SEQ ID NO:506.

[0250] In some embodiments, the pharmaceutical composition includes one or more viral vectors, as described herein, collectively comprising the one or more nucleic acids. In some embodiments, the one or more viral vectors include a recombinant virus selected from a retrovirus, an adenovirus, an adeno-associated virus, a lentivirus, and a herpes simplex virus-1. In some embodiments, the one of more viral vectors include a recombinant adeno-associated virus (AAV). In some embodiments, the recombinant AAV is of serotype 5 (AAV5). In some embodiments, the recombinant AAV is of serotype 6 (AAV6).

[0251] In some embodiments, the one of more viral vectors include a first viral vector comprising a first nucleic acid, in the one or more nucleic acids, encoding the Cas9 protein, and a second viral vector comprising a second nucleic acid, in the one or more nucleic acids, encoding the at least one guide RNA. In some embodiments, the one of more viral vectors comprise a viral vector comprising a single nucleic acid, wherein the single nucleic acid encodes the Cas9 protein and the at least one guide RNA.

[0252] In some embodiments, the composition includes one or more liposomes collectively comprising the one or more nucleic acids. In some embodiments, the one or more nucleic acids are present in a naked state.

[0253] In some embodiments, the Cas9 protein is an S. pyogenes Cas9 polypeptide. In some embodiments, the Cas9 protein is an S. aureus Cas9 polypeptide.

[0254] In some embodiments, the composition is formulated for parenteral administration. In some embodiments, the composition is formulated for intra-articular injection within a joint of a subject.

[0255] In another aspect, the disclosure provides a method for the treatment or prevention of a joint disease or condition in a subject in need thereof. The method includes administering, to a joint of the subject, a pharmaceutical composition comprising a pharmaceutically effective amount of a composition comprising one or more nucleic acids encoding a Clustered Regularly Interspaced Short Palindromic Repeats (CRISPR) gene-editing system. The system includes a CRISPR Associated Protein 9 (Cas9) protein, and at least one guide RNA targeting an IL-1α or IL-1β gene, wherein the target sequence is adjacent to a protospacer adjacent motif (PAM) sequence for the Cas9 protein.

[0256] In some embodiments, the at least one guide RNA targets a human IL-1α gene, and includes a crRNA sequence having at least 75% identity to a sequence selected from the group consisting of SEQ ID NOs: 298-387. In some embodiments, the crRNA sequence has at least 80% identity to a sequence selected from the group consisting of SEQ ID NOs: 298-387. In some embodiments, the crRNA sequence has at least 85% identity to a sequence selected from the group consisting of SEQ ID NOs: 298-387. In some embodiments, the crRNA sequence has at least 90% identity to a sequence selected from the group consisting of SEQ ID NOs: 298-387. In some embodiments, the crRNA sequence has at least 95% identity to a sequence selected from the group consisting of SEQ ID NOs: 298-387. In some embodiments, the crRNA sequence is selected from the group consisting of SEQ ID NOs: 298-387.

[0257] In some embodiments, the at least one guide RNA targets a human IL-1α gene, and includes a crRNA sequence having at least 75% identity to SEQ ID NO:301. In some embodiments, the crRNA sequence has at least 80% identity to SEQ ID NO:301. In some embodiments, the crRNA sequence has at least 85% identity to SEQ ID NO:301. In some embodiments, the crRNA sequence has at least 90% identity to SEQ ID NO:301. In some embodiments, the crRNA sequence has at least 95% identity to SEQ ID NO:301. In some embodiments, the crRNA sequence is SEQ ID NO:301.

[0258] In some embodiments, the at least one guide RNA targets a human IL-1α gene, and includes a crRNA sequence having at least 75% identity to SEQ ID NO:309. In some embodiments, the crRNA sequence has at least 80% identity to SEQ ID NO:309. In some embodiments, the crRNA sequence has at least 85% identity to SEQ ID NO:309. In some embodiments, the crRNA sequence has at least 90% identity to SEQ ID NO:309. In some embodiments, the crRNA sequence has at least 95% identity to SEQ ID NO:309. In some embodiments, the crRNA sequence is SEQ ID NO:309.

[0259] In some embodiments, the at least one guide RNA targets a human IL-1β gene, and includes a crRNA sequence having at least 75% identity to a sequence selected from the group consisting of SEQ ID NOs: 388-496. In some embodiments, the crRNA sequence has at least 80% identity to a sequence selected from the group consisting of SEQ ID NOs: 388-496. In some embodiments, the crRNA sequence has at least 85% identity to a sequence selected from the group consisting of SEQ ID NOs: 388-496. In some embodiments, the crRNA sequence has at least 90% identity to a sequence selected from the group consisting of SEQ ID NOs: 388-496. In some embodiments, the crRNA sequence has at least 95% identity to a sequence selected from the group consisting of SEQ ID NOs: 388-496. In some embodiments, the crRNA sequence is selected from the group consisting of SEQ ID NOs: 388-496.

[0260] In some embodiments, the at least one guide RNA targets a human IL-1β gene, and includes a crRNA sequence having at least 75% identity to SEQ ID NO:462. In some embodiments, the crRNA sequence has at least 80% identity to SEQ ID NO:462. In some embodiments, the crRNA sequence has at least 85% identity to SEQ ID NO:462. In some embodiments, the crRNA sequence has at least 90% identity to SEQ ID NO:462. In some embodiments, the crRNA sequence has at least 95% identity to SEQ ID NO:462. In some embodiments, the crRNA sequence is SEQ ID NO:462.

[0261] In some embodiments, the at least one guide RNA targets a human IL-1β gene, and includes a crRNA sequence having at least 75% identity to SEQ ID NO:391. In some embodiments, the crRNA sequence has at least 80% identity to SEQ ID NO:391. In some embodiments, the crRNA sequence has at least 85% identity to SEQ ID NO:391. In some embodiments, the crRNA sequence has at least 90% identity to SEQ ID NO:391. In some embodiments, the crRNA sequence has at least 95% identity to SEQ ID NO:391. In some embodiments, the crRNA sequence is SEQ ID NO:391.

[0262] In some embodiments, the at least one guide RNA targets a human IL-1β gene, and includes a crRNA sequence having at least 75% identity to SEQ ID NO:393. In some embodiments, the crRNA sequence has at least 80% identity to SEQ ID NO:393. In some embodiments, the crRNA sequence has at least 85% identity to SEQ ID NO:393. In some embodiments, the crRNA sequence has at least 90% identity to SEQ ID NO:393. In some embodiments, the crRNA sequence has at least 95% identity to SEQ ID NO:393. In some embodiments, the crRNA sequence is SEQ ID NO:393.

[0263] In some embodiments, the at least one guide RNA targets a human IL-1β gene, and includes a crRNA sequence having at least 75% identity to SEQ ID NO:388. In some embodiments, the crRNA sequence has at least 80% identity to SEQ ID NO:388. In some embodiments, the crRNA sequence has at least 85% identity to SEQ ID NO:388. In some embodiments, the crRNA sequence has at least 90% identity to SEQ ID NO:388. In some embodiments, the crRNA sequence has at least 95% identity to SEQ ID NO:388. In some embodiments, the crRNA sequence is SEQ ID NO:388.

[0264] In some embodiments, the at least one guide RNA targets a human IL-1β gene, and includes a crRNA sequence having at least 75% identity to SEQ ID NO:389. In some embodiments, the crRNA sequence has at least 80% identity to SEQ ID NO:389. In some embodiments, the crRNA sequence has at least 85% identity to SEQ ID NO:389. In some embodiments, the crRNA sequence has at least 90% identity to SEQ ID NO:389. In some embodiments, the crRNA sequence has at least 95% identity to SEQ ID NO:389. In some embodiments, the crRNA sequence is SEQ ID NO:389.

[0265] In some embodiments, the at least one guide RNA targets a canine IL-1α gene, and includes a crRNA sequence having at least 75% identity to a sequence selected from the group consisting of SEQ ID NOs: 522-590. In some embodiments, the crRNA sequence has at least 80% identity to a sequence selected from the group consisting of SEQ ID NOs: 522-590. In some embodiments, the crRNA sequence has at least 85% identity to a sequence selected from the group consisting of SEQ ID NOs: 522-590. In some embodiments, the crRNA sequence has at least 90% identity to a sequence selected from the group consisting of SEQ ID NOs: 522-590. In some embodiments, the crRNA sequence has at least 95% identity to a sequence selected from the group consisting of SEQ ID NOs: 522-590. In some embodiments, the crRNA sequence is selected from the group consisting of SEQ ID NOs: 522-590.

[0266] In some embodiments, the at least one guide RNA targets a canine IL-1α gene, and includes a crRNA sequence having at least 75% identity to SEQ ID NO:552. In some embodiments, the crRNA sequence has at least 80% identity to SEQ ID NO:552. In some embodiments, the crRNA sequence has at least 85% identity to SEQ ID NO:552. In some embodiments, the crRNA sequence has at least 90% identity to SEQ ID NO:552. In some embodiments, the crRNA sequence has at least 95% identity to SEQ ID NO:552. In some embodiments, the crRNA sequence is SEQ ID NO:552.

[0267] In some embodiments, the at least one guide RNA targets a canine IL-1α gene, and includes a crRNA sequence having at least 75% identity to SEQ ID NO:554. In some embodiments, the crRNA sequence has at least 80% identity to SEQ ID NO:554. In some embodiments, the crRNA sequence has at least 85% identity to SEQ ID NO:554. In some embodiments, the crRNA sequence has at least 90% identity to SEQ ID NO:554. In some embodiments, the crRNA sequence has at least 95% identity to SEQ ID NO:554. In some embodiments, the crRNA sequence is SEQ ID NO:554.

[0268] In some embodiments, the at least one guide RNA targets a canine IL-1α gene, and includes a crRNA sequence having at least 75% identity to SEQ ID NO:578. In some embodiments, the crRNA sequence has at least 80% identity to SEQ ID NO:578. In some embodiments, the crRNA sequence has at least 85% identity to SEQ ID NO:578. In some embodiments, the crRNA sequence has at least 90% identity to SEQ ID NO:578. In some embodiments, the crRNA sequence has at least 95% identity to SEQ ID NO:578. In some embodiments, the crRNA sequence is SEQ ID NO:578.

[0269] In some embodiments, the at least one guide RNA targets a canine IL-1α gene, and includes a crRNA sequence having at least 75% identity to SEQ ID NO:579. In some embodiments, the crRNA sequence has at least 80% identity to SEQ ID NO:579. In some embodiments, the crRNA sequence has at least 85% identity to SEQ ID NO:579. In some embodiments, the crRNA sequence has at least 90% identity to SEQ ID NO:579. In some embodiments, the crRNA sequence has at least 95% identity to SEQ ID NO:579. In some embodiments, the crRNA sequence is SEQ ID NO:579.

[0270] In some embodiments, the at least one guide RNA targets a canine IL-1α gene, and includes a crRNA sequence that is complementary to a target sequence in exon 2 of the IL-1α gene. In some embodiments, the crRNA sequence forms no more than 5 mismatches with the target sequence in exon 2 of the canine IL-1α gene. In some embodiments, the crRNA sequence forms no more than 4 mismatches with the target sequence in exon 2 of the canine IL-1α gene. In some embodiments, the crRNA sequence forms no more than 3 mismatches with the target sequence in exon 2 of the canine IL-1α gene. In some embodiments, the crRNA sequence forms no more than 2 mismatches with the target sequence in exon 2 of the canine IL-1α gene. In some embodiments, the crRNA sequence forms no more than 1 mismatch with the target sequence in exon 2 of the canine IL-1α gene. In some embodiments, the crRNA sequence forms no mismatches with the target sequence in exon 2 of the canine IL-1α gene.

[0271] In some embodiments, the at least one guide RNA targets a canine IL-1α gene, and includes a crRNA sequence that is complementary to a target sequence in exon 3 of the IL-1α gene. In some embodiments, the crRNA sequence forms no more than 5 mismatches with the target sequence in exon 3 of the canine IL-1α gene. In some embodiments, the crRNA sequence forms no more than 4 mismatches with the target sequence in exon 3 of the canine IL-1α gene. In some embodiments, the crRNA sequence forms no more than 3 mismatches with the target sequence in exon 3 of the canine IL-1α gene. In some embodiments, the crRNA sequence forms no more than 2 mismatches with the target sequence in exon 3 of the canine IL-1α gene. In some embodiments, the crRNA sequence forms no more than 1 mismatch with the target sequence in exon 3 of the canine IL-1α gene. In some embodiments, the crRNA sequence forms no mismatches with the target sequence in exon 3 of the canine IL-1α gene.

[0272] In some embodiments, the at least one guide RNA targets a canine IL-1α gene, and includes a crRNA sequence that is complementary to a target sequence in exon 4 of the IL-1α gene. In some embodiments, the crRNA sequence forms no more than 5 mismatches with the target sequence in exon 4 of the canine IL-1α gene. In some embodiments, the crRNA sequence forms no more than 4 mismatches with the target sequence in exon 4 of the canine IL-1α gene. In some embodiments, the crRNA sequence forms no more than 3 mismatches with the target sequence in exon 4 of the canine IL-1α gene. In some embodiments, the crRNA sequence forms no more than 2 mismatches with the target sequence in exon 4 of the canine IL-1α gene. In some embodiments, the crRNA sequence forms no more than 1 mismatch with the target sequence in exon 4 of the canine IL-1α gene. In some embodiments, the crRNA sequence forms no mismatches with the target sequence in exon 4 of the canine IL-1α gene.

[0273] In some embodiments, the at least one guide RNA targets a canine IL-1α gene, and includes a crRNA sequence that is complementary to a target sequence in exon 5 of the IL-1α gene. In some embodiments, the crRNA sequence forms no more than 5 mismatches with the target sequence in exon 5 of the canine IL-1α gene. In some embodiments, the crRNA sequence forms no more than 4 mismatches with the target sequence in exon 5 of the canine IL-1α gene. In some embodiments, the crRNA sequence forms no more than 3 mismatches with the target sequence in exon 5 of the canine IL-1α gene. In some embodiments, the crRNA sequence forms no more than 2 mismatches with the target sequence in exon 5 of the canine IL-1α gene. In some embodiments, the crRNA sequence forms no more than 1 mismatch with the target sequence in exon 5 of the canine IL-1α gene. In some embodiments, the crRNA sequence forms no mismatches with the target sequence in exon 5 of the canine IL-1α gene.

[0274] In some embodiments, the at least one guide RNA targets a canine IL-1α gene, and includes a crRNA sequence that is complementary to a target sequence in exon 6 of the IL-1α gene. In some embodiments, the crRNA sequence forms no more than 5 mismatches with the target sequence in exon 6 of the canine IL-1α gene. In some embodiments, the crRNA sequence forms no more than 4 mismatches with the target sequence in exon 6 of the canine IL-1α gene. In some embodiments, the crRNA sequence forms no more than 3 mismatches with the target sequence in exon 6 of the canine IL-1α gene. In some embodiments, the crRNA sequence forms no more than 2 mismatches with the target sequence in exon 6 of the canine IL-1α gene. In some embodiments, the crRNA sequence forms no more than 1 mismatch with the target sequence in exon 6 of the canine IL-1α gene. In some embodiments, the crRNA sequence forms no mismatches with the target sequence in exon 6 of the canine IL-1α gene.

[0275] In some embodiments, the at least one guide RNA targets a canine IL-1α gene, and includes a crRNA sequence that is complementary to a target sequence in exon 7 of the IL-1α gene. In some embodiments, the crRNA sequence forms no more than 5 mismatches with the target sequence in exon 7 of the canine IL-1α gene. In some embodiments, the crRNA sequence forms no more than 4 mismatches with the target sequence in exon 7 of the canine IL-1α gene. In some embodiments, the crRNA sequence forms no more than 3 mismatches with the target sequence in exon 7 of the canine IL-1α gene. In some embodiments, the crRNA sequence forms no more than 2 mismatches with the target sequence in exon 7 of the canine IL-1α gene. In some embodiments, the crRNA sequence forms no more than 1 mismatch with the target sequence in exon 7 of the canine IL-1α gene. In some embodiments, the crRNA sequence forms no mismatches with the target sequence in exon 7 of the canine IL-1α gene.

[0276] In some embodiments, the at least one guide RNA targets a canine IL-1α gene, and includes a crRNA sequence that is complementary to a target sequence in exon 2 or exon 3 of the IL-1α gene. In some embodiments, the at least one guide RNA targets a canine IL-1α gene, and includes a crRNA sequence that is complementary to a target sequence in exon 2 or exon 4 of the IL-1α gene. In some embodiments, the at least one guide RNA targets a canine IL-1α gene, and includes a crRNA sequence that is complementary to a target sequence in exon 2 or exon 5 of the IL-1α gene. In some embodiments, the at least one guide RNA targets a canine IL-1α gene, and includes a crRNA sequence that is complementary to a target sequence in exon 2 or exon 6 of the IL-1α gene. In some embodiments, the at least one guide RNA targets a canine IL-1α gene, and includes a crRNA sequence that is complementary to a target sequence in exon 2 or exon 7 of the IL-1α gene.

[0277] In some embodiments, the at least one guide RNA targets a canine IL-1α gene, and includes a crRNA sequence that is complementary to a target sequence in exon 3 or exon 4 of the IL-1α gene. In some embodiments, the at least one guide RNA targets a canine IL-1α gene, and includes a crRNA sequence that is complementary to a target sequence in exon 3 or exon 5 of the IL-1α gene. In some embodiments, the at least one guide RNA targets a canine IL-1α gene, and includes a crRNA sequence that is complementary to a target sequence in exon 3 or exon 6 of the IL-1α gene. In some embodiments, the at least one guide RNA targets a canine IL-1α gene, and includes a crRNA sequence that is complementary to a target sequence in exon 3 or exon 7 of the IL-1α gene.

[0278] In some embodiments, the at least one guide RNA targets a canine IL-1α gene, and includes a crRNA sequence that is complementary to a target sequence in exon 4 or exon 5 of the IL-1α gene. In some embodiments, the at least one guide RNA targets a canine IL-1α gene, and includes a crRNA sequence that is complementary to a target sequence in exon 4 or exon 6 of the IL-1α gene. In some embodiments, the at least one guide RNA targets a canine IL-1α gene, and includes a crRNA sequence that is complementary to a target sequence in exon 4 or exon 7 of the IL-1α gene.

[0279] In some embodiments, the at least one guide RNA targets a canine IL-1α gene, and includes a crRNA sequence that is complementary to a target sequence in exon 5 or exon 6 of the IL-1α gene. In some embodiments, the at least one guide RNA targets a canine IL-1α gene, and includes a crRNA sequence that is complementary to a target sequence in exon 5 or exon 7 of the IL-1α gene. In some embodiments, the at least one guide RNA targets a canine IL-1α gene, and includes a crRNA sequence that is complementary to a target sequence in exon 6 or exon 7 of the IL-1α gene.

[0280] In some embodiments, the at least one guide RNA targets a canine IL-1α gene, and includes a crRNA sequence that is complementary to a target sequence in exon 2, exon 3, or exon 4 of the IL-1α gene. In some embodiments, the at least one guide RNA targets a canine IL-1α gene, and includes a crRNA sequence that is complementary to a target sequence in exon 2, exon 3, or exon 5 of the IL-1α gene. In some embodiments, the at least one guide RNA targets a canine IL-1α gene, and includes a crRNA sequence that is complementary to a target sequence in exon 2, exon 3, or exon 6 of the IL-1α gene. In some embodiments, the at least one guide RNA targets a canine IL-1α gene, and includes a crRNA sequence that is complementary to a target sequence in exon 2, exon 3, or exon 7 of the IL-1α gene. In some embodiments, the at least one guide RNA targets a canine IL-1α gene, and includes a crRNA sequence that is complementary to a target sequence in exon 2, exon 4, or exon 5 of the IL-1α gene. In some embodiments, the at least one guide RNA targets a canine IL-1α gene, and includes a crRNA sequence that is complementary to a target sequence in exon 2, exon 4, or exon 6 of the IL-1α gene. In some embodiments, the at least one guide RNA targets a canine IL-1α gene, and includes a crRNA sequence that is complementary to a target sequence in exon 2, exon 4, or exon 7 of the IL-1α gene. In some embodiments, the at least one guide RNA targets a canine IL-1α gene, and includes a crRNA sequence that is complementary to a target sequence in exon 2, exon 5, or exon 6 of the IL-1α gene. In some embodiments, the at least one guide RNA targets a canine IL-1α gene, and includes a crRNA sequence that is complementary to a target sequence in exon 2, exon 5, or exon 7 of the IL-1α gene. In some embodiments, the at least one guide RNA targets a canine IL-1α gene, and includes a crRNA sequence that is complementary to a target sequence in exon 2, exon 6, or exon 7 of the IL-1α gene.

[0281] In some embodiments, the at least one guide RNA targets a canine IL-1α gene, and includes a crRNA sequence that is complementary to a target sequence in exon 3, exon 4, or exon 5 of the IL-1α gene. In some embodiments, the at least one guide RNA targets a canine IL-1α gene, and includes a crRNA sequence that is complementary to a target sequence in exon 3, exon 4, or exon 6 of the IL-1α gene. In some embodiments, the at least one guide RNA targets a canine IL-1α gene, and includes a crRNA sequence that is complementary to a target sequence in exon 3, exon 4, or exon 7 of the IL-1α gene. In some embodiments, the at least one guide RNA targets a canine IL-1α gene, and includes a crRNA sequence that is complementary to a target sequence in exon 3, exon 5, or exon 6 of the IL-1α gene. In some embodiments, the at least one guide RNA targets a canine IL-1α gene, and includes a crRNA sequence that is complementary to a target sequence in exon 3, exon 5, or exon 7 of the IL-1α gene. In some embodiments, the at least one guide RNA targets a canine IL-1α gene, and includes a crRNA sequence that is complementary to a target sequence in exon 3, exon 6, or exon 7 of the IL-1α gene.

[0282] In some embodiments, the at least one guide RNA targets a canine IL-1α gene, and includes a crRNA sequence that is complementary to a target sequence in exon 4, exon 5, or exon 6 of the IL-1α gene. In some embodiments, the at least one guide RNA targets a canine IL-1α gene, and includes a crRNA sequence that is complementary to a target sequence in exon 4, exon 5, or exon 7 of the IL-1α gene. In some embodiments, the at least one guide RNA targets a canine IL-1α gene, and includes a crRNA sequence that is complementary to a target sequence in exon 4, exon 6, or exon 7 of the IL-1α gene. In some embodiments, the at least one guide RNA targets a canine IL-1α gene, and includes a crRNA sequence that is complementary to a target sequence in exon 5, exon 6, or exon 7 of the IL-1α gene.

[0283] In some embodiments, the at least one guide RNA targets a canine IL-1α gene, and includes a crRNA sequence that is complementary to a target sequence in exon 2, exon 3, exon 4, or exon 5 of the IL-1α gene. In some embodiments, the at least one guide RNA targets a canine IL-1α gene, and includes a crRNA sequence that is complementary to a target sequence in exon 2, exon 3, exon 4, or exon 6 of the IL-1α gene. In some embodiments, the at least one guide RNA targets a canine IL-1α gene, and includes a crRNA sequence that is complementary to a target sequence in exon 2, exon 3, exon 4, or exon 7 of the IL-1α gene. In some embodiments, the at least one guide RNA targets a canine IL-1α gene, and includes a crRNA sequence that is complementary to a target sequence in exon 2, exon 4, exon 5, or exon 6 of the IL-1α gene. In some embodiments, the at least one guide RNA targets a canine IL-1α gene, and includes a crRNA sequence that is complementary to a target sequence in exon 2, exon 4, exon 5, or exon 7 of the IL-1α gene. In some embodiments, the at least one guide RNA targets a canine IL-1α gene, and includes a crRNA sequence that is complementary to a target sequence in exon 2, exon 4, exon 6, or exon 7 of the IL-1α gene. In some embodiments, the at least one guide RNA targets a canine IL-1α gene, and includes a crRNA sequence that is complementary to a target sequence in exon 2, exon 5, exon 6, or exon 7 of the IL-1α gene.

[0284] In some embodiments, the at least one guide RNA targets a canine IL-1α gene, and includes a crRNA sequence that is complementary to a target sequence in exon 3, exon 4, exon 5, or exon 6 of the IL-1α gene. In some embodiments, the at least one guide RNA targets a canine IL-1α gene, and includes a crRNA sequence that is complementary to a target sequence in exon 3, exon 4, exon 5, or exon 7 of the IL-1α gene. In some embodiments, the at least one guide RNA targets a canine IL-1α gene, and includes a crRNA sequence that is complementary to a target sequence in exon 3, exon 4, exon 6, or exon 7 of the IL-1α gene. In some embodiments, the at least one guide RNA targets a canine IL-1α gene, and includes a crRNA sequence that is complementary to a target sequence in exon 3, exon 5, exon 6, or exon 7 of the IL-1α gene. In some embodiments, the at least one guide RNA targets a canine IL-1α gene, and includes a crRNA sequence that is complementary to a target sequence in exon 4, exon 5, exon 6, or exon 7 of the IL-1α gene.

[0285] In some embodiments, the at least one guide RNA targets a canine IL-1α gene, and includes a crRNA sequence that is complementary to a target sequence in exon 2, exon 3, exon 4, exon 5, or exon 6 of the IL-1α gene. In some embodiments, the at least one guide RNA targets a canine IL-1α gene, and includes a crRNA sequence that is complementary to a target sequence in exon 2, exon 3, exon 4, exon 5, or exon 7 of the IL-1α gene. In some embodiments, the at least one guide RNA targets a canine IL-1α gene, and includes a crRNA sequence that is complementary to a target sequence in exon 3, exon 4, exon 5, exon 6, or exon 7 of the IL-1α gene. In some embodiments, the at least one guide RNA targets a canine IL-1α gene, and includes a crRNA sequence that is complementary to a target sequence in exon 2, exon 4, exon 5, exon 6, or exon 7 of the IL-1α gene. In some embodiments, the at least one guide RNA targets a canine IL-1α gene, and includes a crRNA sequence that is complementary to a target sequence in exon 2, exon 3, exon 5, exon 6, or exon 6 of the IL-1α gene. In some embodiments, the at least one guide RNA targets a canine IL-1α gene, and includes a crRNA sequence that is complementary to a target sequence in exon 2, exon 3, exon 4, exon 6, or exon 7 of the IL-1α gene. In some embodiments, the at least one guide RNA targets a canine IL-1α gene, and includes a crRNA sequence that is complementary to a target sequence in exon 2, exon 3, exon 4, exon 5, exon 6, or exon 7 of the IL-1α gene.

[0286] In some embodiments, the at least one guide RNA targets a canine IL-1β gene, and includes a crRNA sequence having at least 75% identity to a sequence selected from the group consisting of SEQ ID NOs: 497-551. In some embodiments, the crRNA sequence has at least 80% identity to a sequence selected from the group consisting of SEQ ID NOs: 497-551. In some embodiments, the crRNA sequence has at least 85% identity to a sequence selected from the group consisting of SEQ ID NOs: 497-551. In some embodiments, the crRNA sequence has at least 90% identity to a sequence selected from the group consisting of SEQ ID NOs: 497-551. In some embodiments, the crRNA sequence has at least 95% identity to a sequence selected from the group consisting of SEQ ID NOs: 497-551. In some embodiments, the crRNA sequence is selected from the group consisting of SEQ ID NOs: 497-551.

[0287] In some embodiments, the at least one guide RNA targets a canine IL-1β gene, and includes a crRNA sequence having at least 75% identity to SEQ ID NO:498. In some embodiments, the crRNA sequence has at least 80% identity to SEQ ID NO:498. In some embodiments, the crRNA sequence has at least 85% identity to SEQ ID NO:498. In some embodiments, the crRNA sequence has at least 90% identity to SEQ ID NO:498. In some embodiments, the crRNA sequence has at least 95% identity to SEQ ID NO:498. In some embodiments, the crRNA sequence is SEQ ID NO:498.

[0288] In some embodiments, the at least one guide RNA targets a canine IL-1β gene, and includes a crRNA sequence having at least 75% identity to SEQ ID NO:506. In some embodiments, the crRNA sequence has at least 80% identity to SEQ ID NO:506. In some embodiments, the crRNA sequence has at least 85% identity to SEQ ID NO:506. In some embodiments, the crRNA sequence has at least 90% identity to SEQ ID NO:506. In some embodiments, the crRNA sequence has at least 95% identity to SEQ ID NO:506. In some embodiments, the crRNA sequence is SEQ ID NO:506.

[0289] In some embodiments, the at least one guide RNA targets a canine IL-1β gene, and includes a crRNA sequence that is complementary to a target sequence in exon 2 of the IL-1β gene. In some embodiments, the crRNA sequence forms no more than 5 mismatches with the target sequence in exon 2 of the canine IL-1β gene. In some embodiments, the crRNA sequence forms no more than 4 mismatches with the target sequence in exon 2 of the canine IL-1β gene. In some embodiments, the crRNA sequence forms no more than 3 mismatches with the target sequence in exon 2 of the canine IL-1β gene. In some embodiments, the crRNA sequence forms no more than 2 mismatches with the target sequence in exon 2 of the canine IL-1β gene. In some embodiments, the crRNA sequence forms no more than 1 mismatch with the target sequence in exon 2 of the canine IL-1β gene. In some embodiments, the crRNA sequence forms no mismatches with the target sequence in exon 2 of the canine IL-1β gene.

[0290] In some embodiments, the at least one guide RNA targets a canine IL-1β gene, and includes a crRNA sequence that is complementary to a target sequence in exon 3 of the IL-1β gene. In some embodiments, the crRNA sequence forms no more than 5 mismatches with the target sequence in exon 3 of the canine IL-1β gene. In some embodiments, the crRNA sequence forms no more than 4 mismatches with the target sequence in exon 3 of the canine IL-1β gene. In some embodiments, the crRNA sequence forms no more than 3 mismatches with the target sequence in exon 3 of the canine IL-1β gene. In some embodiments, the crRNA sequence forms no more than 2 mismatches with the target sequence in exon 3 of the canine IL-1β gene. In some embodiments, the crRNA sequence forms no more than 1 mismatch with the target sequence in exon 3 of the canine IL-1β gene. In some embodiments, the crRNA sequence forms no mismatches with the target sequence in exon 3 of the canine IL-1β gene.

[0291] In some embodiments, the at least one guide RNA targets a canine IL-1β gene, and includes a crRNA sequence that is complementary to a target sequence in exon 4 of the IL-1β gene. In some embodiments, the crRNA sequence forms no more than 5 mismatches with the target sequence in exon 4 of the canine IL-1β gene. In some embodiments, the crRNA sequence forms no more than 4 mismatches with the target sequence in exon 4 of the canine IL-1β gene. In some embodiments, the crRNA sequence forms no more than 3 mismatches with the target sequence in exon 4 of the canine IL-1β gene. In some embodiments, the crRNA sequence forms no more than 2 mismatches with the target sequence in exon 4 of the canine IL-1β gene. In some embodiments, the crRNA sequence forms no more than 1 mismatch with the target sequence in exon 4 of the canine IL-1β gene. In some embodiments, the crRNA sequence forms no mismatches with the target sequence in exon 4 of the canine IL-1β gene.

[0292] In some embodiments, the at least one guide RNA targets a canine IL-1β gene, and includes a crRNA sequence that is complementary to a target sequence in exon 5 of the IL-1β gene. In some embodiments, the crRNA sequence forms no more than 5 mismatches with the target sequence in exon 5 of the canine IL-1β gene. In some embodiments, the crRNA sequence forms no more than 4 mismatches with the target sequence in exon 5 of the canine IL-1β gene. In some embodiments, the crRNA sequence forms no more than 3 mismatches with the target sequence in exon 5 of the canine IL-1β gene. In some embodiments, the crRNA sequence forms no more than 2 mismatches with the target sequence in exon 5 of the canine IL-1β gene. In some embodiments, the crRNA sequence forms no more than 1 mismatch with the target sequence in exon 5 of the canine IL-1β gene. In some embodiments, the crRNA sequence forms no mismatches with the target sequence in exon 5 of the canine IL-1β gene.

[0293] In some embodiments, the at least one guide RNA targets a canine IL-1β gene, and includes a crRNA sequence that is complementary to a target sequence in exon 6 of the IL-1β gene. In some embodiments, the crRNA sequence forms no more than 5 mismatches with the target sequence in exon 6 of the canine IL-1β gene. In some embodiments, the crRNA sequence forms no more than 4 mismatches with the target sequence in exon 6 of the canine IL-1β gene. In some embodiments, the crRNA sequence forms no more than 3 mismatches with the target sequence in exon 6 of the canine IL-1β gene. In some embodiments, the crRNA sequence forms no more than 2 mismatches with the target sequence in exon 6 of the canine IL-1β gene. In some embodiments, the crRNA sequence forms no more than 1 mismatch with the target sequence in exon 6 of the canine IL-1β gene. In some embodiments, the crRNA sequence forms no mismatches with the target sequence in exon 6 of the canine IL-1β gene.

[0294] In some embodiments, the at least one guide RNA targets a canine IL-1β gene, and includes a crRNA sequence that is complementary to a target sequence in exon 7 of the IL-1β gene. In some embodiments, the crRNA sequence forms no more than 5 mismatches with the target sequence in exon 7 of the canine IL-1β gene. In some embodiments, the crRNA sequence forms no more than 4 mismatches with the target sequence in exon 7 of the canine IL-1β gene. In some embodiments, the crRNA sequence forms no more than 3 mismatches with the target sequence in exon 7 of the canine IL-1β gene. In some embodiments, the crRNA sequence forms no more than 2 mismatches with the target sequence in exon 7 of the canine IL-1β gene. In some embodiments, the crRNA sequence forms no more than 1 mismatch with the target sequence in exon 7 of the canine IL-1β gene. In some embodiments, the crRNA sequence forms no mismatches with the target sequence in exon 7 of the canine IL-1β gene.

[0295] In some embodiments, the at least one guide RNA targets a canine IL-1β gene, and includes a crRNA sequence that is complementary to a target sequence in exon 2 or exon 3 of the IL-1β gene. In some embodiments, the at least one guide RNA targets a canine IL-1β gene, and includes a crRNA sequence that is complementary to a target sequence in exon 2 or exon 4 of the IL-1β gene. In some embodiments, the at least one guide RNA targets a canine IL-1β gene, and includes a crRNA sequence that is complementary to a target sequence in exon 2 or exon 5 of the IL-1β gene. In some embodiments, the at least one guide RNA targets a canine IL-1β gene, and includes a crRNA sequence that is complementary to a target sequence in exon 2 or exon 6 of the IL-1β gene. In some embodiments, the at least one guide RNA targets a canine IL-1β gene, and includes a crRNA sequence that is complementary to a target sequence in exon 2 or exon 7 of the IL-1β gene.

[0296] In some embodiments, the at least one guide RNA targets a canine IL-1β gene, and includes a crRNA sequence that is complementary to a target sequence in exon 3 or exon 4 of the IL-1β gene. In some embodiments, the at least one guide RNA targets a canine IL-1β gene, and includes a crRNA sequence that is complementary to a target sequence in exon 3 or exon 5 of the IL-1β gene. In some embodiments, the at least one guide RNA targets a canine IL-1β gene, and includes a crRNA sequence that is complementary to a target sequence in exon 3 or exon 6 of the IL-1β gene. In some embodiments, the at least one guide RNA targets a canine IL-1β gene, and includes a crRNA sequence that is complementary to a target sequence in exon 3 or exon 7 of the IL-1β gene.

[0297] In some embodiments, the at least one guide RNA targets a canine IL-1β gene, and includes a crRNA sequence that is complementary to a target sequence in exon 4 or exon 5 of the IL-1β gene. In some embodiments, the at least one guide RNA targets a canine IL-1β gene, and includes a crRNA sequence that is complementary to a target sequence in exon 4 or exon 6 of the IL-1β gene. In some embodiments, the at least one guide RNA targets a canine IL-1β gene, and includes a crRNA sequence that is complementary to a target sequence in exon 4 or exon 7 of the IL-1β gene.

[0298] In some embodiments, the at least one guide RNA targets a canine IL-1β gene, and includes a crRNA sequence that is complementary to a target sequence in exon 5 or exon 6 of the IL-1β gene. In some embodiments, the at least one guide RNA targets a canine IL-1β gene, and includes a crRNA sequence that is complementary to a target sequence in exon 5 or exon 7 of the IL-1β gene. In some embodiments, the at least one guide RNA targets a canine IL-1β gene, and includes a crRNA sequence that is complementary to a target sequence in exon 6 or exon 7 of the IL-1β gene.

[0299] In some embodiments, the at least one guide RNA targets a canine IL-1β gene, and includes a crRNA sequence that is complementary to a target sequence in exon 2, exon 3, or exon 4 of the IL-1β gene. In some embodiments, the at least one guide RNA targets a canine IL-1β gene, and includes a crRNA sequence that is complementary to a target sequence in exon 2, exon 3, or exon 5 of the IL-1β gene. In some embodiments, the at least one guide RNA targets a canine IL-1β gene, and includes a crRNA sequence that is complementary to a target sequence in exon 2, exon 3, or exon 6 of the IL-1β gene. In some embodiments, the at least one guide RNA targets a canine IL-1β gene, and includes a crRNA sequence that is complementary to a target sequence in exon 2, exon 3, or exon 7 of the IL-1β gene. In some embodiments, the at least one guide RNA targets a canine IL-1β gene, and includes a crRNA sequence that is complementary to a target sequence in exon 2, exon 4, or exon 5 of the IL-1β gene. In some embodiments, the at least one guide RNA targets a canine IL-1β gene, and includes a crRNA sequence that is complementary to a target sequence in exon 2, exon 4, or exon 6 of the IL-1β gene. In some embodiments, the at least one guide RNA targets a canine IL-1β gene, and includes a crRNA sequence that is complementary to a target sequence in exon 2, exon 4, or exon 7 of the IL-1β gene. In some embodiments, the at least one guide RNA targets a canine IL-1β gene, and includes a crRNA sequence that is complementary to a target sequence in exon 2, exon 5, or exon 6 of the IL-1β gene. In some embodiments, the at least one guide RNA targets a canine IL-1β gene, and includes a crRNA sequence that is complementary to a target sequence in exon 2, exon 5, or exon 7 of the IL-1β gene. In some embodiments, the at least one guide RNA targets a canine IL-1β gene, and includes a crRNA sequence that is complementary to a target sequence in exon 2, exon 6, or exon 7 of the IL-1β gene.

[0300] In some embodiments, the at least one guide RNA targets a canine IL-1β gene, and includes a crRNA sequence that is complementary to a target sequence in exon 3, exon 4, or exon 5 of the IL-1β gene. In some embodiments, the at least one guide RNA targets a canine IL-1β gene, and includes a crRNA sequence that is complementary to a target sequence in exon 3, exon 4, or exon 6 of the IL-1β gene. In some embodiments, the at least one guide RNA targets a canine IL-1β gene, and includes a crRNA sequence that is complementary to a target sequence in exon 3, exon 4, or exon 7 of the IL-1β gene. In some embodiments, the at least one guide RNA targets a canine IL-1β gene, and includes a crRNA sequence that is complementary to a target sequence in exon 3, exon 5, or exon 6 of the IL-1β gene. In some embodiments, the at least one guide RNA targets a canine IL-1β gene, and includes a crRNA sequence that is complementary to a target sequence in exon 3, exon 5, or exon 7 of the IL-1β gene. In some embodiments, the at least one guide RNA targets a canine IL-1β gene, and includes a crRNA sequence that is complementary to a target sequence in exon 3, exon 6, or exon 7 of the IL-1β gene.

[0301] In some embodiments, the at least one guide RNA targets a canine IL-1β gene, and includes a crRNA sequence that is complementary to a target sequence in exon 4, exon 5, or exon 6 of the IL-1β gene. In some embodiments, the at least one guide RNA targets a canine IL-1β gene, and includes a crRNA sequence that is complementary to a target sequence in exon 4, exon 5, or exon 7 of the IL-1β gene. In some embodiments, the at least one guide RNA targets a canine IL-1β gene, and includes a crRNA sequence that is complementary to a target sequence in exon 4, exon 6, or exon 7 of the IL-1β gene. In some embodiments, the at least one guide RNA targets a canine IL-1β gene, and includes a crRNA sequence that is complementary to a target sequence in exon 5, exon 6, or exon 7 of the IL-1β gene.

[0302] In some embodiments, the at least one guide RNA targets a canine IL-1β gene, and includes a crRNA sequence that is complementary to a target sequence in exon 2, exon 3, exon 4, or exon 5 of the IL-1β gene. In some embodiments, the at least one guide RNA targets a canine IL-1β gene, and includes a crRNA sequence that is complementary to a target sequence in exon 2, exon 3, exon 4, or exon 6 of the IL-1β gene. In some embodiments, the at least one guide RNA targets a canine IL-1β gene, and includes a crRNA sequence that is complementary to a target sequence in exon 2, exon 3, exon 4, or exon 7 of the IL-1β gene. In some embodiments, the at least one guide RNA targets a canine IL-1β gene, and includes a crRNA sequence that is complementary to a target sequence in exon 2, exon 4, exon 5, or exon 6 of the IL-1β gene. In some embodiments, the at least one guide RNA targets a canine IL-1β gene, and includes a crRNA sequence that is complementary to a target sequence in exon 2, exon 4, exon 5, or exon 7 of the IL-1β gene. In some embodiments, the at least one guide RNA targets a canine IL-1β gene, and includes a crRNA sequence that is complementary to a target sequence in exon 2, exon 4, exon 6, or exon 7 of the IL-1β gene. In some embodiments, the at least one guide RNA targets a canine IL-1β gene, and includes a crRNA sequence that is complementary to a target sequence in exon 2, exon 5, exon 6, or exon 7 of the IL-1β gene.

[0303] In some embodiments, the at least one guide RNA targets a canine IL-1β gene, and includes a crRNA sequence that is complementary to a target sequence in exon 3, exon 4, exon 5, or exon 6 of the IL-1β gene. In some embodiments, the at least one guide RNA targets a canine IL-1β gene, and includes a crRNA sequence that is complementary to a target sequence in exon 3, exon 4, exon 5, or exon 7 of the IL-1β gene. In some embodiments, the at least one guide RNA targets a canine IL-1β gene, and includes a crRNA sequence that is complementary to a target sequence in exon 3, exon 4, exon 6, or exon 7 of the IL-1β gene. In some embodiments, the at least one guide RNA targets a canine IL-1β gene, and includes a crRNA sequence that is complementary to a target sequence in exon 3, exon 5, exon 6, or exon 7 of the IL-1β gene. In some embodiments, the at least one guide RNA targets a canine IL-1β gene, and includes a crRNA sequence that is complementary to a target sequence in exon 4, exon 5, exon 6, or exon 7 of the IL-1β gene.

[0304] In some embodiments, the at least one guide RNA targets a canine IL-1β gene, and includes a crRNA sequence that is complementary to a target sequence in exon 2, exon 3, exon 4, exon 5, or exon 6 of the IL-1β gene. In some embodiments, the at least one guide RNA targets a canine IL-1β gene, and includes a crRNA sequence that is complementary to a target sequence in exon 2, exon 3, exon 4, exon 5, or exon 7 of the IL-1β gene. In some embodiments, the at least one guide RNA targets a canine IL-1β gene, and includes a crRNA sequence that is complementary to a target sequence in exon 3, exon 4, exon 5, exon 6, or exon 7 of the IL-1β gene. In some embodiments, the at least one guide RNA targets a canine IL-1β gene, and includes a crRNA sequence that is complementary to a target sequence in exon 2, exon 4, exon 5, exon 6, or exon 7 of the IL-1β gene. In some embodiments, the at least one guide RNA targets a canine IL-1β gene, and includes a crRNA sequence that is complementary to a target sequence in exon 2, exon 3, exon 5, exon 6, or exon 6 of the IL-1β gene. In some embodiments, the at least one guide RNA targets a canine IL-1β gene, and includes a crRNA sequence that is complementary to a target sequence in exon 2, exon 3, exon 4, exon 6, or exon 7 of the IL-1β gene. In some embodiments, the at least one guide RNA targets a canine IL-1β gene, and includes a crRNA sequence that is complementary to a target sequence in exon 2, exon 3, exon 4, exon 5, exon 6, or exon 7 of the IL-1β gene.

[0305] Generally, the crRNA sequences described herein may include one or more nucleotide substitutions, e.g., relative to the reverse complement of the target sequence. Guidance for making nucleotide substitutions can be found, for example, in Jiang et al. and Doudna (Jiang and Doudna, Annu. Rev. Biophys., 46:505-29 (2017)), the content of which is incorporated herein by reference, in its entirety, for all purposes. Specifically, Jiang and Doudna considers molecular structures generated for many different confirmations of the CRISPR/Cas9 system, ranging from apo Cas9 protein (FIG. 3) to Cas9-sgRNA complexes bound to the target strand of an invaded double-stranded DNA molecule (FIGS. 5 and 7), to arrive at a detailed molecule model of CRISPR/Cas9 binding and cleavage in FIG. 6. From these molecular models, the person of ordinary skill in the art would know which nucleotide positions in the crRNA sequence would be more tolerant of mismatches with the target sequence.

[0306] For instance, Jiang teaches that the PAM-proximal 10-12 nucleotides, also known as the ‘seed region’ of the crRNA targeting sequence, are most critical for robust CRISPR/Cas9 binding. Specifically, Jiang discloses that mismatches in the seed region “severely impair or completely abrogate target DNA binding and cleavage, whereas close homology in the seed region often leads to off-target binding events even with many mismatches elsewhere,” i.e., in the PAM-distal 8-10 nucleotides. Jiang at 512. Similarly, Jiang teaches that “[p]erfect complementarity between the seed region of sgRNA and target DNA is necessary for Cas9-mediated DNA targeting and cleavage, whereas imperfect base pairing at the nonseed region is much more tolerated for target binding specificity. Id., citations omitted.

[0307] Accordingly, in some embodiments, a crRNA sequence used in the compositions and/or methods of the disclosure include one or more nucleotide substitutions, e.g., relative to any of SEQ ID NOs: 298-590, within the PAM-distal 8-10 nucleotides. In some embodiments, a crRNA sequence includes one nucleotide substitution, e.g., relative to any of SEQ ID NOs: 298-590, within the PAM-distal 8-10 nucleotides. In some embodiments, a crRNA sequence includes two nucleotide substitutions, e.g., relative to any of SEQ ID NOs: 298-590, within the PAM-distal 8-10 nucleotides. In some embodiments, a crRNA sequence includes three nucleotide substitutions, e.g., relative to any of SEQ ID NOs: 298-590, within the PAM-distal 8-10 nucleotides. In some embodiments, a crRNA sequence includes four nucleotide substitutions, e.g., relative to any of SEQ ID NOs: 298-590, within the PAM-distal 8-10 nucleotides. In some embodiments, a crRNA sequence includes five nucleotide substitutions, e.g., relative to any of SEQ ID NOs: 298-590, within the PAM-distal 8-10 nucleotides.

[0308] Accordingly, in some embodiments, a crRNA sequence used in the compositions and/or methods of the disclosure include one or more nucleotide substitutions, e.g., relative to any of SEQ ID NOs: 298-590, within the first 8 positions of the crRNA sequence. In some embodiments, a crRNA sequence includes one nucleotide substitution, e.g., relative to any of SEQ ID NOs: 298-590, within the first 8 positions of the crRNA sequence. In some embodiments, a crRNA sequence includes two nucleotide substitutions, e.g., relative to any of SEQ ID NOs: 298-590, within the first 8 positions of the crRNA sequence. In some embodiments, a crRNA sequence includes three nucleotide substitutions, e.g., relative to any of SEQ ID NOs: 298-590, within the first 8 positions of the crRNA sequence. In some embodiments, a crRNA sequence includes four nucleotide substitutions, e.g., relative to any of SEQ ID NOs: 298-590, within the first 8 positions of the crRNA sequence. In some embodiments, a crRNA sequence includes five nucleotide substitutions, e.g., relative to any of SEQ ID NOs: 298-590, within the first 8 positions of the crRNA sequence.

[0309] Similarly, in some embodiments, a crRNA sequence used in the compositions and/or methods of the disclosure include one or more nucleotide substitutions, e.g., relative to any of SEQ ID NOs: 298-590, within the first 10 positions of the crRNA sequence. In some embodiments, a crRNA sequence includes one nucleotide substitution, e.g., relative to any of SEQ ID NOs: 298-590, within the first 10 positions of the crRNA sequence. In some embodiments, a crRNA sequence includes two nucleotide substitutions, e.g., relative to any of SEQ ID NOs: 298-590, within the first 10 positions of the crRNA sequence. In some embodiments, a crRNA sequence includes three nucleotide substitutions, e.g., relative to any of SEQ ID NOs: 298-590, within the first 10 positions of the crRNA sequence. In some embodiments, a crRNA sequence includes four nucleotide substitutions, e.g., relative to any of SEQ ID NOs: 298-590, within the first 10 positions of the crRNA sequence. In some embodiments, a crRNA sequence includes five nucleotide substitutions, e.g., relative to any of SEQ ID NOs: 298-590, within the first 10 positions of the crRNA sequence.

[0310] Further, Jiang and Doudna postulates that base pairing of PAM-distal nucleotides at positions 14-17 of the crRNA targeting sequence are important for cleavage activity, following binding to the target sequence.

[0311] Accordingly, in some embodiments, a crRNA sequence used in the compositions and/or methods of the disclosure include one or more nucleotide substitutions, e.g., relative to any of SEQ ID NOs: 298-590, within nucleotide positions 1-3 and 8-10 of the crRNA sequence. In some embodiments, a crRNA sequence includes one nucleotide substitution, e.g., relative to any of SEQ ID NOs: 298-590, within nucleotide positions 1-3 and 8-10 of the crRNA sequence. In some embodiments, a crRNA sequence includes two nucleotide substitutions, e.g., relative to any of SEQ ID NOs: 298-590, within nucleotide positions 1-3 and 8-10 of the crRNA sequence. In some embodiments, a crRNA sequence includes three nucleotide substitutions, e.g., relative to any of SEQ ID NOs: 298-590, within nucleotide positions 1-3 and 8-10 of the crRNA sequence. In some embodiments, a crRNA sequence includes four nucleotide substitutions, e.g., relative to any of SEQ ID NOs: 298-590, within nucleotide positions 1-3 and 8-10 of the crRNA sequence. In some embodiments, a crRNA sequence includes five nucleotide substitutions, e.g., relative to any of SEQ ID NOs: 298-590, within nucleotide positions 1-3 and 8-10 of the crRNA sequence.

[0312] Similarly, in some embodiments, a crRNA sequence used in the compositions and/or methods of the disclosure includes one or more nucleotide substitutions, e.g., relative to any of SEQ ID NOs: 298-590, within nucleotide positions 1-3 and 8 of the crRNA sequence. In some embodiments, a crRNA sequence includes one nucleotide substitution, e.g., relative to any of SEQ ID NOs: 298-590, within nucleotide positions 1-3 and 8 of the crRNA sequence. In some embodiments, a crRNA. In some embodiments, a crRNA sequence includes two nucleotide substitutions, e.g., relative to any of SEQ ID NOs: 298-590, within nucleotide positions 1-3 and 8 of the crRNA sequence. In some embodiments, a crRNA. In some embodiments, a crRNA sequence includes three nucleotide substitutions, e.g., relative to any of SEQ ID NOs: 298-590, within nucleotide positions 1-3 and 8 of the crRNA sequence. In some embodiments, a crRNA. In some embodiments, a crRNA sequence includes four nucleotide substitutions, e.g., relative to any of SEQ ID NOs: 298-590, within nucleotide positions 1-3 and 8 of the crRNA sequence. In some embodiments, a crRNA.

[0313] In yet other embodiments, a crRNA sequence used in the compositions and/or methods of the disclosure include one or more nucleotide substitutions, e.g., relative to any of SEQ ID NOs: 298-590, throughout the entire sequence of the crRNA, e.g., as determined through experimentation. In some embodiments, a crRNA sequence used in the compositions and/or methods of the disclosure includes one nucleotide substitution, e.g., relative to any of SEQ ID NOs: 298-590, throughout the entire sequence of the crRNA, e.g., as determined through experimentation. In some embodiments, a crRNA sequence used in the compositions and/or methods of the disclosure includes two nucleotide substitutions, e.g., relative to any of SEQ ID NOs: 298-590, throughout the entire sequence of the crRNA, e.g., as determined through experimentation. In some embodiments, a crRNA sequence used in the compositions and/or methods of the disclosure includes three nucleotide substitutions, e.g., relative to any of SEQ ID NOs: 298-590, throughout the entire sequence of the crRNA, e.g., as determined through experimentation. In some embodiments, a crRNA sequence used in the compositions and/or methods of the disclosure includes four nucleotide substitutions, e.g., relative to any of SEQ ID NOs: 298-590, throughout the entire sequence of the crRNA, e.g., as determined through experimentation. In some embodiments, a crRNA sequence used in the compositions and/or methods of the disclosure includes five nucleotide substitutions, e.g., relative to any of SEQ ID NOs: 298-590, throughout the entire sequence of the crRNA, e.g., as determined through experimentation.

[0314] In some embodiments, the present disclosure provides a pharmaceutical composition for the treatment or prevention of a joint disease or condition, the composition including a therapeutically effective amount of one or more nucleic acids encoding a Clustered Regularly Interspaced Short Palindromic Repeats (CRISPR) gene-editing system. The system includes a CRISPR Associated Protein 9 (Cas9) protein, and at least one guide RNA targeting an PGD gene, wherein the target sequence is adjacent to a protospacer adjacent motif (PAM) sequence for the Cas9 protein. In some embodiments, the at least one guide RNA includes a crRNA sequence that is complementary to a target sequence in any one of exons of the PGD gene. In some embodiments, the at least one guide RNA includes a crRNA sequence that is complementary to a target sequence in one of exons disclosed herein of the PGD gene. In some embodiments, the at least one guide RNA has a crRNA sequence having at least 75% identity to a sequence selected from SEQ ID NOs: 681-705. In some embodiments, the at least one guide RNA has a crRNA sequence having at least 80% identity to a sequence selected from SEQ ID NOs: 681-705. In some embodiments, the at least one guide RNA has a crRNA sequence having at least 85% identity to a sequence selected from SEQ ID NOs: 681-705. In some embodiments, the at least one guide RNA has a crRNA sequence having at least 90% identity to a sequence selected from SEQ ID NOs: 681-705. In some embodiments, the at least one guide RNA has a crRNA sequence having at least 95% identity to a sequence selected from SEQ ID NOs: 681-705. In some embodiments, the at least one guide RNA has a crRNA sequence selected from SEQ ID NOs: 681-705.

[0315] In some embodiments, the present disclosure provides method for the treatment or prevention of a joint disease or condition in a subject in need thereof. The method includes administering, to a joint of the subject, a pharmaceutical composition including a pharmaceutically effective amount of a composition having one or more nucleic acids encoding a Clustered Regularly Interspaced Short Palindromic Repeats (CRISPR) gene-editing system. The system includes a CRISPR Associated Protein 9 (Cas9) protein, and at least one guide RNA targeting an PGD gene, wherein the target sequence is adjacent to a protospacer adjacent motif (PAM) sequence for the Cas9 protein. In some embodiments, the at least one guide RNA includes a crRNA sequence that is complementary to a target sequence in any one of exons of the PGD gene. In some embodiments, the at least one guide RNA includes a crRNA sequence that is complementary to a target sequence in one of exons disclosed herein of the PGD gene. In some embodiments, the at least one guide RNA has a crRNA sequence having at least 75% identity to a sequence selected from SEQ ID NOs: 681-705. In some embodiments, the at least one guide RNA has a crRNA sequence having at least 80% identity to a sequence selected from SEQ ID NOs: 681-705. In some embodiments, the at least one guide RNA has a crRNA sequence having at least 85% identity to a sequence selected from SEQ ID NOs: 681-705. In some embodiments, the at least one guide RNA has a crRNA sequence having at least 90% identity to a sequence selected from SEQ ID NOs: 681-705. In some embodiments, the at least one guide RNA has a crRNA sequence having at least 95% identity to a sequence selected from SEQ ID NOs: 681-705. In some embodiments, the at least one guide RNA has a crRNA sequence selected from SEQ ID NOs: 681-705. In some embodiments, the joint disease or condition is arthritis, e.g., osteoarthritis. In some embodiments, the administering includes intra-articular injection of the pharmaceutical composition into the joint of the subject.

[0316] In some embodiments, the present disclosure provides a pharmaceutical composition for the treatment or prevention of a joint disease or condition, the composition including a therapeutically effective amount of one or more nucleic acids encoding a Clustered Regularly Interspaced Short Palindromic Repeats (CRISPR) gene-editing system. The system includes a CRISPR Associated Protein 9 (Cas9) protein, and at least one guide RNA targeting an ADH1A gene, wherein the target sequence is adjacent to a protospacer adjacent motif (PAM) sequence for the Cas9 protein. In some embodiments, the at least one guide RNA includes a crRNA sequence that is complementary to a target sequence in any one of exons of the ADH1A gene. In some embodiments, the at least one guide RNA includes a crRNA sequence that is complementary to a target sequence in one of exons disclosed herein of the ADH1A gene. In some embodiments, the at least one guide RNA has a crRNA sequence having at least 75% identity to a sequence selected from SEQ ID NOs: 706-730. In some embodiments, the at least one guide RNA has a crRNA sequence having at least 80% identity to a sequence selected from SEQ ID NOs: 706-730. In some embodiments, the at least one guide RNA has a crRNA sequence having at least 85% identity to a sequence selected from SEQ ID NOs: 706-730. In some embodiments, the at least one guide RNA has a crRNA sequence having at least 90% identity to a sequence selected from SEQ ID NOs: 706-730. In some embodiments, the at least one guide RNA has a crRNA sequence having at least 95% identity to a sequence selected from SEQ ID NOs: 706-730. In some embodiments, the at least one guide RNA has a crRNA sequence selected from SEQ ID NOs: 706-730.

[0317] In some embodiments, the present disclosure provides method for the treatment or prevention of a joint disease or condition in a subject in need thereof. The method includes administering, to a joint of the subject, a pharmaceutical composition including a pharmaceutically effective amount of a composition having one or more nucleic acids encoding a Clustered Regularly Interspaced Short Palindromic Repeats (CRISPR) gene-editing system. The system includes a CRISPR Associated Protein 9 (Cas9) protein, and at least one guide RNA targeting an ADH1A gene, wherein the target sequence is adjacent to a protospacer adjacent motif (PAM) sequence for the Cas9 protein. In some embodiments, the at least one guide RNA includes a crRNA sequence that is complementary to a target sequence in any one of exons of the ADH1A gene. In some embodiments, the at least one guide RNA includes a crRNA sequence that is complementary to a target sequence in one of exons disclosed herein of the ADH1A gene. In some embodiments, the at least one guide RNA has a crRNA sequence having at least 75% identity to a sequence selected from SEQ ID NOs: 706-730. In some embodiments, the at least one guide RNA has a crRNA sequence having at least 80% identity to a sequence selected from SEQ ID NOs: 706-730. In some embodiments, the at least one guide RNA has a crRNA sequence having at least 85% identity to a sequence selected from SEQ ID NOs: 706-730. In some embodiments, the at least one guide RNA has a crRNA sequence having at least 90% identity to a sequence selected from SEQ ID NOs: 706-730. In some embodiments, the at least one guide RNA has a crRNA sequence having at least 95% identity to a sequence selected from SEQ ID NOs: 706-730. In some embodiments, the at least one guide RNA has a crRNA sequence selected from SEQ ID NOs: 706-730. In some embodiments, the joint disease or condition is arthritis, e.g., osteoarthritis. In some embodiments, the administering includes intra-articular injection of the pharmaceutical composition into the joint of the subject.

[0318] In some embodiments, the present disclosure provides a pharmaceutical composition for the treatment or prevention of a joint disease or condition, the composition including a therapeutically effective amount of one or more nucleic acids encoding a Clustered Regularly Interspaced Short Palindromic Repeats (CRISPR) gene-editing system. The system includes a CRISPR Associated Protein 9 (Cas9) protein, and at least one guide RNA targeting an ADH1B gene, wherein the target sequence is adjacent to a protospacer adjacent motif (PAM) sequence for the Cas9 protein. In some embodiments, the at least one guide RNA includes a crRNA sequence that is complementary to a target sequence in any one of exons of the ADH1B gene. In some embodiments, the at least one guide RNA includes a crRNA sequence that is complementary to a target sequence in one of exons disclosed herein of the ADH1B gene. In some embodiments, the at least one guide RNA has a crRNA sequence having at least 75% identity to a sequence selected from SEQ ID NOs: 731-755. In some embodiments, the at least one guide RNA has a crRNA sequence having at least 80% identity to a sequence selected from SEQ ID NOs: 731-755. In some embodiments, the at least one guide RNA has a crRNA sequence having at least 85% identity to a sequence selected from SEQ ID NOs: 731-755. In some embodiments, the at least one guide RNA has a crRNA sequence having at least 90% identity to a sequence selected from SEQ ID NOs: 731-755. In some embodiments, the at least one guide RNA has a crRNA sequence having at least 95% identity to a sequence selected from SEQ ID NOs: 731-755. In some embodiments, the at least one guide RNA has a crRNA sequence selected from SEQ ID NOs: 731-755.

[0319] In some embodiments, the present disclosure provides method for the treatment or prevention of a joint disease or condition in a subject in need thereof. The method includes administering, to a joint of the subject, a pharmaceutical composition including a pharmaceutically effective amount of a composition having one or more nucleic acids encoding a Clustered Regularly Interspaced Short Palindromic Repeats (CRISPR) gene-editing system. The system includes a CRISPR Associated Protein 9 (Cas9) protein, and at least one guide RNA targeting an ADH1B gene, wherein the target sequence is adjacent to a protospacer adjacent motif (PAM) sequence for the Cas9 protein. In some embodiments, the at least one guide RNA includes a crRNA sequence that is complementary to a target sequence in any one of exons of the ADH1B gene. In some embodiments, the at least one guide RNA includes a crRNA sequence that is complementary to a target sequence in one of exons disclosed herein of the ADH1B gene. In some embodiments, the at least one guide RNA has a crRNA sequence having at least 75% identity to a sequence selected from SEQ ID NOs: 731-755. In some embodiments, the at least one guide RNA has a crRNA sequence having at least 80% identity to a sequence selected from SEQ ID NOs: 731-755. In some embodiments, the at least one guide RNA has a crRNA sequence having at least 85% identity to a sequence selected from SEQ ID NOs: 731-755. In some embodiments, the at least one guide RNA has a crRNA sequence having at least 90% identity to a sequence selected from SEQ ID NOs: 731-755. In some embodiments, the at least one guide RNA has a crRNA sequence having at least 95% identity to a sequence selected from SEQ ID NOs: 731-755. In some embodiments, the at least one guide RNA has a crRNA sequence selected from SEQ ID NOs: 731-755. In some embodiments, the joint disease or condition is arthritis, e.g., osteoarthritis. In some embodiments, the administering includes intra-articular injection of the pharmaceutical composition into the joint of the subject.

[0320] In some embodiments, the present disclosure provides a pharmaceutical composition for the treatment or prevention of a joint disease or condition, the composition including a therapeutically effective amount of one or more nucleic acids encoding a Clustered Regularly Interspaced Short Palindromic Repeats (CRISPR) gene-editing system. The system includes a CRISPR Associated Protein 9 (Cas9) protein, and at least one guide RNA targeting an ADH1C gene, wherein the target sequence is adjacent to a protospacer adjacent motif (PAM) sequence for the Cas9 protein. In some embodiments, the at least one guide RNA includes a crRNA sequence that is complementary to a target sequence in any one of exons of the ADH1C gene. In some embodiments, the at least one guide RNA includes a crRNA sequence that is complementary to a target sequence in one of exons disclosed herein of the ADH1C gene. In some embodiments, the at least one guide RNA has a crRNA sequence having at least 75% identity to a sequence selected from SEQ ID NOs: 756-780. In some embodiments, the at least one guide RNA has a crRNA sequence having at least 80% identity to a sequence selected from SEQ ID NOs: 756-780. In some embodiments, the at least one guide RNA has a crRNA sequence having at least 85% identity to a sequence selected from SEQ ID NOs: 756-780. In some embodiments, the at least one guide RNA has a crRNA sequence having at least 90% identity to a sequence selected from SEQ ID NOs: 756-780. In some embodiments, the at least one guide RNA has a crRNA sequence having at least 95% identity to a sequence selected from SEQ ID NOs: 756-780. In some embodiments, the at least one guide RNA has a crRNA sequence selected from SEQ ID NOs: 756-780.

[0321] In some embodiments, the present disclosure provides method for the treatment or prevention of a joint disease or condition in a subject in need thereof. The method includes administering, to a joint of the subject, a pharmaceutical composition including a pharmaceutically effective amount of a composition having one or more nucleic acids encoding a Clustered Regularly Interspaced Short Palindromic Repeats (CRISPR) gene-editing system. The system includes a CRISPR Associated Protein 9 (Cas9) protein, and at least one guide RNA targeting an ADH1C gene, wherein the target sequence is adjacent to a protospacer adjacent motif (PAM) sequence for the Cas9 protein. In some embodiments, the at least one guide RNA includes a crRNA sequence that is complementary to a target sequence in any one of exons of the ADH1C gene. In some embodiments, the at least one guide RNA includes a crRNA sequence that is complementary to a target sequence in one of exons disclosed herein of the ADH1C gene. In some embodiments, the at least one guide RNA has a crRNA sequence having at least 75% identity to a sequence selected from SEQ ID NOs: 756-780. In some embodiments, the at least one guide RNA has a crRNA sequence having at least 80% identity to a sequence selected from SEQ ID NOs: 756-780. In some embodiments, the at least one guide RNA has a crRNA sequence having at least 85% identity to a sequence selected from SEQ ID NOs: 756-780. In some embodiments, the at least one guide RNA has a crRNA sequence having at least 90% identity to a sequence selected from SEQ ID NOs: 756-780. In some embodiments, the at least one guide RNA has a crRNA sequence having at least 95% identity to a sequence selected from SEQ ID NOs: 756-780. In some embodiments, the at least one guide RNA has a crRNA sequence selected from SEQ ID NOs: 756-780. In some embodiments, the joint disease or condition is arthritis, e.g., osteoarthritis. In some embodiments, the administering includes intra-articular injection of the pharmaceutical composition into the joint of the subject.

[0322] In some embodiments, the present disclosure provides a pharmaceutical composition for the treatment or prevention of a joint disease or condition, the composition including a therapeutically effective amount of one or more nucleic acids encoding a Clustered Regularly Interspaced Short Palindromic Repeats (CRISPR) gene-editing system. The system includes a CRISPR Associated Protein 9 (Cas9) protein, and at least one guide RNA targeting an ADH4 gene, wherein the target sequence is adjacent to a protospacer adjacent motif (PAM) sequence for the Cas9 protein. In some embodiments, the at least one guide RNA includes a crRNA sequence that is complementary to a target sequence in any one of exons of the ADH4 gene. In some embodiments, the at least one guide RNA includes a crRNA sequence that is complementary to a target sequence in one of exons disclosed herein of the ADH4 gene. In some embodiments, the at least one guide RNA has a crRNA sequence having at least 75% identity to a sequence selected from SEQ ID NOs: 781-805. In some embodiments, the at least one guide RNA has a crRNA sequence having at least 80% identity to a sequence selected from SEQ ID NOs: 781-805. In some embodiments, the at least one guide RNA has a crRNA sequence having at least 85% identity to a sequence selected from SEQ ID NOs: 781-805. In some embodiments, the at least one guide RNA has a crRNA sequence having at least 90% identity to a sequence selected from SEQ ID NOs: 781-805. In some embodiments, the at least one guide RNA has a crRNA sequence having at least 95% identity to a sequence selected from SEQ ID NOs: 781-805. In some embodiments, the at least one guide RNA has a crRNA sequence selected from SEQ ID NOs: 781-805.

[0323] In some embodiments, the present disclosure provides method for the treatment or prevention of a joint disease or condition in a subject in need thereof. The method includes administering, to a joint of the subject, a pharmaceutical composition including a pharmaceutically effective amount of a composition having one or more nucleic acids encoding a Clustered Regularly Interspaced Short Palindromic Repeats (CRISPR) gene-editing system. The system includes a CRISPR Associated Protein 9 (Cas9) protein, and at least one guide RNA targeting an ADH4 gene, wherein the target sequence is adjacent to a protospacer adjacent motif (PAM) sequence for the Cas9 protein. In some embodiments, the at least one guide RNA includes a crRNA sequence that is complementary to a target sequence in any one of exons of the ADH4 gene. In some embodiments, the at least one guide RNA includes a crRNA sequence that is complementary to a target sequence in one of exons disclosed herein of the ADH4 gene. In some embodiments, the at least one guide RNA has a crRNA sequence having at least 75% identity to a sequence selected from SEQ ID NOs: 781-805. In some embodiments, the at least one guide RNA has a crRNA sequence having at least 80% identity to a sequence selected from SEQ ID NOs: 781-805. In some embodiments, the at least one guide RNA has a crRNA sequence having at least 85% identity to a sequence selected from SEQ ID NOs: 781-805. In some embodiments, the at least one guide RNA has a crRNA sequence having at least 90% identity to a sequence selected from SEQ ID NOs: 781-805. In some embodiments, the at least one guide RNA has a crRNA sequence having at least 95% identity to a sequence selected from SEQ ID NOs: 781-805. In some embodiments, the at least one guide RNA has a crRNA sequence selected from SEQ ID NOs: 781-805. In some embodiments, the joint disease or condition is arthritis, e.g., osteoarthritis. In some embodiments, the administering includes intra-articular injection of the pharmaceutical composition into the joint of the subject.

[0324] In some embodiments, the present disclosure provides a pharmaceutical composition for the treatment or prevention of a joint disease or condition, the composition including a therapeutically effective amount of one or more nucleic acids encoding a Clustered Regularly Interspaced Short Palindromic Repeats (CRISPR) gene-editing system. The system includes a CRISPR Associated Protein 9 (Cas9) protein, and at least one guide RNA targeting an ADH5 gene, wherein the target sequence is adjacent to a protospacer adjacent motif (PAM) sequence for the Cas9 protein. In some embodiments, the at least one guide RNA includes a crRNA sequence that is complementary to a target sequence in any one of exons of the ADH5 gene. In some embodiments, the at least one guide RNA includes a crRNA sequence that is complementary to a target sequence in one of exons disclosed herein of the ADH5 gene. In some embodiments, the at least one guide RNA has a crRNA sequence having at least 75% identity to a sequence selected from SEQ ID NOs: 806-830. In some embodiments, the at least one guide RNA has a crRNA sequence having at least 80% identity to a sequence selected from SEQ ID NOs: 806-830. In some embodiments, the at least one guide RNA has a crRNA sequence having at least 85% identity to a sequence selected from SEQ ID NOs: 806-830. In some embodiments, the at least one guide RNA has a crRNA sequence having at least 90% identity to a sequence selected from SEQ ID NOs: 806-830. In some embodiments, the at least one guide RNA has a crRNA sequence having at least 95% identity to a sequence selected from SEQ ID NOs: 806-830. In some embodiments, the at least one guide RNA has a crRNA sequence selected from SEQ ID NOs: 806-830.

[0325] In some embodiments, the present disclosure provides method for the treatment or prevention of a joint disease or condition in a subject in need thereof. The method includes administering, to a joint of the subject, a pharmaceutical composition including a pharmaceutically effective amount of a composition having one or more nucleic acids encoding a Clustered Regularly Interspaced Short Palindromic Repeats (CRISPR) gene-editing system. The system includes a CRISPR Associated Protein 9 (Cas9) protein, and at least one guide RNA targeting an ADH5 gene, wherein the target sequence is adjacent to a protospacer adjacent motif (PAM) sequence for the Cas9 protein. In some embodiments, the at least one guide RNA includes a crRNA sequence that is complementary to a target sequence in any one of exons of the ADH5 gene. In some embodiments, the at least one guide RNA includes a crRNA sequence that is complementary to a target sequence in one of exons disclosed herein of the ADH5 gene. In some embodiments, the at least one guide RNA has a crRNA sequence having at least 75% identity to a sequence selected from SEQ ID NOs: 806-830. In some embodiments, the at least one guide RNA has a crRNA sequence having at least 80% identity to a sequence selected from SEQ ID NOs: 806-830. In some embodiments, the at least one guide RNA has a crRNA sequence having at least 85% identity to a sequence selected from SEQ ID NOs: 806-830. In some embodiments, the at least one guide RNA has a crRNA sequence having at least 90% identity to a sequence selected from SEQ ID NOs: 806-830. In some embodiments, the at least one guide RNA has a crRNA sequence having at least 95% identity to a sequence selected from SEQ ID NOs: 806-830. In some embodiments, the at least one guide RNA has a crRNA sequence selected from SEQ ID NOs: 806-830. In some embodiments, the joint disease or condition is arthritis, e.g., osteoarthritis. In some embodiments, the administering includes intra-articular injection of the pharmaceutical composition into the joint of the subject.

[0326] In some embodiments, the present disclosure provides a pharmaceutical composition for the treatment or prevention of a joint disease or condition, the composition including a therapeutically effective amount of one or more nucleic acids encoding a Clustered Regularly Interspaced Short Palindromic Repeats (CRISPR) gene-editing system. The system includes a CRISPR Associated Protein 9 (Cas9) protein, and at least one guide RNA targeting an ADH6 gene, wherein the target sequence is adjacent to a protospacer adjacent motif (PAM) sequence for the Cas9 protein. In some embodiments, the at least one guide RNA includes a crRNA sequence that is complementary to a target sequence in any one of exons of the ADH6 gene. In some embodiments, the at least one guide RNA includes a crRNA sequence that is complementary to a target sequence in one of exons disclosed herein of the ADH6 gene. In some embodiments, the at least one guide RNA has a crRNA sequence having at least 75% identity to a sequence selected from SEQ ID NOs: 831-855. In some embodiments, the at least one guide RNA has a crRNA sequence having at least 80% identity to a sequence selected from SEQ ID NOs: 831-855. In some embodiments, the at least one guide RNA has a crRNA sequence having at least 85% identity to a sequence selected from SEQ ID NOs: 831-855. In some embodiments, the at least one guide RNA has a crRNA sequence having at least 90% identity to a sequence selected from SEQ ID NOs: 831-855. In some embodiments, the at least one guide RNA has a crRNA sequence having at least 95% identity to a sequence selected from SEQ ID NOs: 831-855. In some embodiments, the at least one guide RNA has a crRNA sequence selected from SEQ ID NOs: 831-855.

[0327] In some embodiments, the present disclosure provides method for the treatment or prevention of a joint disease or condition in a subject in need thereof. The method includes administering, to a joint of the subject, a pharmaceutical composition including a pharmaceutically effective amount of a composition having one or more nucleic acids encoding a Clustered Regularly Interspaced Short Palindromic Repeats (CRISPR) gene-editing system. The system includes a CRISPR Associated Protein 9 (Cas9) protein, and at least one guide RNA targeting an ADH6 gene, wherein the target sequence is adjacent to a protospacer adjacent motif (PAM) sequence for the Cas9 protein. In some embodiments, the at least one guide RNA includes a crRNA sequence that is complementary to a target sequence in any one of exons of the ADH6 gene. In some embodiments, the at least one guide RNA includes a crRNA sequence that is complementary to a target sequence in one of exons disclosed herein of the ADH6 gene. In some embodiments, the at least one guide RNA has a crRNA sequence having at least 75% identity to a sequence selected from SEQ ID NOs: 831-855. In some embodiments, the at least one guide RNA has a crRNA sequence having at least 80% identity to a sequence selected from SEQ ID NOs: 831-855. In some embodiments, the at least one guide RNA has a crRNA sequence having at least 85% identity to a sequence selected from SEQ ID NOs: 831-855. In some embodiments, the at least one guide RNA has a crRNA sequence having at least 90% identity to a sequence selected from SEQ ID NOs: 831-855. In some embodiments, the at least one guide RNA has a crRNA sequence having at least 95% identity to a sequence selected from SEQ ID NOs: 831-855. In some embodiments, the at least one guide RNA has a crRNA sequence selected from SEQ ID NOs: 831-855. In some embodiments, the joint disease or condition is arthritis, e.g., osteoarthritis. In some embodiments, the administering includes intra-articular injection of the pharmaceutical composition into the joint of the subject.

[0328] In some embodiments, the present disclosure provides a pharmaceutical composition for the treatment or prevention of a joint disease or condition, the composition including a therapeutically effective amount of one or more nucleic acids encoding a Clustered Regularly Interspaced Short Palindromic Repeats (CRISPR) gene-editing system. The system includes a CRISPR Associated Protein 9 (Cas9) protein, and at least one guide RNA targeting an ADH7 gene, wherein the target sequence is adjacent to a protospacer adjacent motif (PAM) sequence for the Cas9 protein. In some embodiments, the at least one guide RNA includes a crRNA sequence that is complementary to a target sequence in any one of exons of the ADH7 gene. In some embodiments, the at least one guide RNA includes a crRNA sequence that is complementary to a target sequence in one of exons disclosed herein of the ADH7 gene. In some embodiments, the at least one guide RNA has a crRNA sequence having at least 75% identity to a sequence selected from SEQ ID NOs: 856-880. In some embodiments, the at least one guide RNA has a crRNA sequence having at least 80% identity to a sequence selected from SEQ ID NOs: 856-880. In some embodiments, the at least one guide RNA has a crRNA sequence having at least 85% identity to a sequence selected from SEQ ID NOs: 856-880. In some embodiments, the at least one guide RNA has a crRNA sequence having at least 90% identity to a sequence selected from SEQ ID NOs: 856-880. In some embodiments, the at least one guide RNA has a crRNA sequence having at least 95% identity to a sequence selected from SEQ ID NOs: 856-880. In some embodiments, the at least one guide RNA has a crRNA sequence selected from SEQ ID NOs: 856-880.

[0329] In some embodiments, the present disclosure provides method for the treatment or prevention of a joint disease or condition in a subject in need thereof. The method includes administering, to a joint of the subject, a pharmaceutical composition including a pharmaceutically effective amount of a composition having one or more nucleic acids encoding a Clustered Regularly Interspaced Short Palindromic Repeats (CRISPR) gene-editing system. The system includes a CRISPR Associated Protein 9 (Cas9) protein, and at least one guide RNA targeting an ADH7 gene, wherein the target sequence is adjacent to a protospacer adjacent motif (PAM) sequence for the Cas9 protein. In some embodiments, the at least one guide RNA includes a crRNA sequence that is complementary to a target sequence in any one of exons of the ADH7 gene. In some embodiments, the at least one guide RNA includes a crRNA sequence that is complementary to a target sequence in one of exons disclosed herein of the ADH7 gene. In some embodiments, the at least one guide RNA has a crRNA sequence having at least 75% identity to a sequence selected from SEQ ID NOs: 856-880. In some embodiments, the at least one guide RNA has a crRNA sequence having at least 80% identity to a sequence selected from SEQ ID NOs: 856-880. In some embodiments, the at least one guide RNA has a crRNA sequence having at least 85% identity to a sequence selected from SEQ ID NOs: 856-880. In some embodiments, the at least one guide RNA has a crRNA sequence having at least 90% identity to a sequence selected from SEQ ID NOs: 856-880. In some embodiments, the at least one guide RNA has a crRNA sequence having at least 95% identity to a sequence selected from SEQ ID NOs: 856-880. In some embodiments, the at least one guide RNA has a crRNA sequence selected from SEQ ID NOs: 856-880. In some embodiments, the joint disease or condition is arthritis, e.g., osteoarthritis. In some embodiments, the administering includes intra-articular injection of the pharmaceutical composition into the joint of the subject.

[0330] In some embodiments, the present disclosure provides a pharmaceutical composition for the treatment or prevention of a joint disease or condition, the composition including a therapeutically effective amount of one or more nucleic acids encoding a Clustered Regularly Interspaced Short Palindromic Repeats (CRISPR) gene-editing system. The system includes a CRISPR Associated Protein 9 (Cas9) protein, and at least one guide RNA targeting an ALDH2 gene, wherein the target sequence is adjacent to a protospacer adjacent motif (PAM) sequence for the Cas9 protein. In some embodiments, the at least one guide RNA includes a crRNA sequence that is complementary to a target sequence in any one of exons of the ALDH2 gene. In some embodiments, the at least one guide RNA includes a crRNA sequence that is complementary to a target sequence in one of exons disclosed herein of the ALDH2 gene. In some embodiments, the at least one guide RNA has a crRNA sequence having at least 75% identity to a sequence selected from SEQ ID NOs: 881-905. In some embodiments, the at least one guide RNA has a crRNA sequence having at least 80% identity to a sequence selected from SEQ ID NOs: 881-905. In some embodiments, the at least one guide RNA has a crRNA sequence having at least 85% identity to a sequence selected from SEQ ID NOs: 881-905. In some embodiments, the at least one guide RNA has a crRNA sequence having at least 90% identity to a sequence selected from SEQ ID NOs: 881-905. In some embodiments, the at least one guide RNA has a crRNA sequence having at least 95% identity to a sequence selected from SEQ ID NOs: 881-905. In some embodiments, the at least one guide RNA has a crRNA sequence selected from SEQ ID NOs: 881-905.

[0331] In some embodiments, the present disclosure provides method for the treatment or prevention of a joint disease or condition in a subject in need thereof. The method includes administering, to a joint of the subject, a pharmaceutical composition including a pharmaceutically effective amount of a composition having one or more nucleic acids encoding a Clustered Regularly Interspaced Short Palindromic Repeats (CRISPR) gene-editing system. The system includes a CRISPR Associated Protein 9 (Cas9) protein, and at least one guide RNA targeting an ALDH2 gene, wherein the target sequence is adjacent to a protospacer adjacent motif (PAM) sequence for the Cas9 protein. In some embodiments, the at least one guide RNA includes a crRNA sequence that is complementary to a target sequence in any one of exons of the ALDH2 gene. In some embodiments, the at least one guide RNA includes a crRNA sequence that is complementary to a target sequence in one of exons disclosed herein of the ALDH2 gene. In some embodiments, the at least one guide RNA has a crRNA sequence having at least 75% identity to a sequence selected from SEQ ID NOs: 881-905. In some embodiments, the at least one guide RNA has a crRNA sequence having at least 80% identity to a sequence selected from SEQ ID NOs: 881-905. In some embodiments, the at least one guide RNA has a crRNA sequence having at least 85% identity to a sequence selected from SEQ ID NOs: 881-905. In some embodiments, the at least one guide RNA has a crRNA sequence having at least 90% identity to a sequence selected from SEQ ID NOs: 881-905. In some embodiments, the at least one guide RNA has a crRNA sequence having at least 95% identity to a sequence selected from SEQ ID NOs: 881-905. In some embodiments, the at least one guide RNA has a crRNA sequence selected from SEQ ID NOs: 881-905. In some embodiments, the joint disease or condition is arthritis, e.g., osteoarthritis. In some embodiments, the administering includes intra-articular injection of the pharmaceutical composition into the joint of the subject.

[0332] In some embodiments, the present disclosure provides a pharmaceutical composition for the treatment or prevention of a joint disease or condition, the composition including a therapeutically effective amount of one or more nucleic acids encoding a Clustered Regularly Interspaced Short Palindromic Repeats (CRISPR) gene-editing system. The system includes a CRISPR Associated Protein 9 (Cas9) protein, and at least one guide RNA targeting an JUN gene, wherein the target sequence is adjacent to a protospacer adjacent motif (PAM) sequence for the Cas9 protein. In some embodiments, the at least one guide RNA includes a crRNA sequence that is complementary to a target sequence in any one of exons of the JUN gene. In some embodiments, the at least one guide RNA includes a crRNA sequence that is complementary to a target sequence in one of exons disclosed herein of the JUN gene. In some embodiments, the at least one guide RNA has a crRNA sequence having at least 75% identity to a sequence selected from SEQ ID NOs: 906-930. In some embodiments, the at least one guide RNA has a crRNA sequence having at least 80% identity to a sequence selected from SEQ ID NOs: 906-930. In some embodiments, the at least one guide RNA has a crRNA sequence having at least 85% identity to a sequence selected from SEQ ID NOs: 906-930. In some embodiments, the at least one guide RNA has a crRNA sequence having at least 90% identity to a sequence selected from SEQ ID NOs: 906-930. In some embodiments, the at least one guide RNA has a crRNA sequence having at least 95% identity to a sequence selected from SEQ ID NOs: 906-930. In some embodiments, the at least one guide RNA has a crRNA sequence selected from SEQ ID NOs: 906-930.

[0333] In some embodiments, the present disclosure provides method for the treatment or prevention of a joint disease or condition in a subject in need thereof. The method includes administering, to a joint of the subject, a pharmaceutical composition including a pharmaceutically effective amount of a composition having one or more nucleic acids encoding a Clustered Regularly Interspaced Short Palindromic Repeats (CRISPR) gene-editing system. The system includes a CRISPR Associated Protein 9 (Cas9) protein, and at least one guide RNA targeting an JUN gene, wherein the target sequence is adjacent to a protospacer adjacent motif (PAM) sequence for the Cas9 protein. In some embodiments, the at least one guide RNA includes a crRNA sequence that is complementary to a target sequence in any one of exons of the JUN gene. In some embodiments, the at least one guide RNA includes a crRNA sequence that is complementary to a target sequence in one of exons disclosed herein of the JUN gene. In some embodiments, the at least one guide RNA has a crRNA sequence having at least 75% identity to a sequence selected from SEQ ID NOs: 906-930. In some embodiments, the at least one guide RNA has a crRNA sequence having at least 80% identity to a sequence selected from SEQ ID NOs: 906-930. In some embodiments, the at least one guide RNA has a crRNA sequence having at least 85% identity to a sequence selected from SEQ ID NOs: 906-930. In some embodiments, the at least one guide RNA has a crRNA sequence having at least 90% identity to a sequence selected from SEQ ID NOs: 906-930. In some embodiments, the at least one guide RNA has a crRNA sequence having at least 95% identity to a sequence selected from SEQ ID NOs: 906-930. In some embodiments, the at least one guide RNA has a crRNA sequence selected from SEQ ID NOs: 906-930. In some embodiments, the joint disease or condition is arthritis, e.g., osteoarthritis. In some embodiments, the administering includes intra-articular injection of the pharmaceutical composition into the joint of the subject.

[0334] In some embodiments, the present disclosure provides a pharmaceutical composition for the treatment or prevention of a joint disease or condition, the composition including a therapeutically effective amount of one or more nucleic acids encoding a Clustered Regularly Interspaced Short Palindromic Repeats (CRISPR) gene-editing system. The system includes a CRISPR Associated Protein 9 (Cas9) protein, and at least one guide RNA targeting an BCL2L1 gene, wherein the target sequence is adjacent to a protospacer adjacent motif (PAM) sequence for the Cas9 protein. In some embodiments, the at least one guide RNA includes a crRNA sequence that is complementary to a target sequence in any one of exons of the BCL2L1 gene. In some embodiments, the at least one guide RNA includes a crRNA sequence that is complementary to a target sequence in one of exons disclosed herein of the BCL2L1 gene. In some embodiments, the at least one guide RNA has a crRNA sequence having at least 75% identity to a sequence selected from SEQ ID NOs: 931-955. In some embodiments, the at least one guide RNA has a crRNA sequence having at least 80% identity to a sequence selected from SEQ ID NOs: 931-955. In some embodiments, the at least one guide RNA has a crRNA sequence having at least 85% identity to a sequence selected from SEQ ID NOs: 931-955. In some embodiments, the at least one guide RNA has a crRNA sequence having at least 90% identity to a sequence selected from SEQ ID NOs: 931-955. In some embodiments, the at least one guide RNA has a crRNA sequence having at least 95% identity to a sequence selected from SEQ ID NOs: 931-955. In some embodiments, the at least one guide RNA has a crRNA sequence selected from SEQ ID NOs: 931-955.

[0335] In some embodiments, the present disclosure provides method for the treatment or prevention of a joint disease or condition in a subject in need thereof. The method includes administering, to a joint of the subject, a pharmaceutical composition including a pharmaceutically effective amount of a composition having one or more nucleic acids encoding a Clustered Regularly Interspaced Short Palindromic Repeats (CRISPR) gene-editing system. The system includes a CRISPR Associated Protein 9 (Cas9) protein, and at least one guide RNA targeting an BCL2L1 gene, wherein the target sequence is adjacent to a protospacer adjacent motif (PAM) sequence for the Cas9 protein. In some embodiments, the at least one guide RNA includes a crRNA sequence that is complementary to a target sequence in any one of exons of the BCL2L1 gene. In some embodiments, the at least one guide RNA includes a crRNA sequence that is complementary to a target sequence in one of exons disclosed herein of the BCL2L1 gene. In some embodiments, the at least one guide RNA has a crRNA sequence having at least 75% identity to a sequence selected from SEQ ID NOs: 931-955. In some embodiments, the at least one guide RNA has a crRNA sequence having at least 80% identity to a sequence selected from SEQ ID NOs: 931-955. In some embodiments, the at least one guide RNA has a crRNA sequence having at least 85% identity to a sequence selected from SEQ ID NOs: 931-955. In some embodiments, the at least one guide RNA has a crRNA sequence having at least 90% identity to a sequence selected from SEQ ID NOs: 931-955. In some embodiments, the at least one guide RNA has a crRNA sequence having at least 95% identity to a sequence selected from SEQ ID NOs: 931-955. In some embodiments, the at least one guide RNA has a crRNA sequence selected from SEQ ID NOs: 931-955. In some embodiments, the joint disease or condition is arthritis, e.g., osteoarthritis. In some embodiments, the administering includes intra-articular injection of the pharmaceutical composition into the joint of the subject.

[0336] In some embodiments, the present disclosure provides a pharmaceutical composition for the treatment or prevention of a joint disease or condition, the composition including a therapeutically effective amount of one or more nucleic acids encoding a Clustered Regularly Interspaced Short Palindromic Repeats (CRISPR) gene-editing system. The system includes a CRISPR Associated Protein 9 (Cas9) protein, and at least one guide RNA targeting an BCL2 gene, wherein the target sequence is adjacent to a protospacer adjacent motif (PAM) sequence for the Cas9 protein. In some embodiments, the at least one guide RNA includes a crRNA sequence that is complementary to a target sequence in any one of exons of the BCL2 gene. In some embodiments, the at least one guide RNA includes a crRNA sequence that is complementary to a target sequence in one of exons disclosed herein of the BCL2 gene. In some embodiments, the at least one guide RNA has a crRNA sequence having at least 75% identity to a sequence selected from SEQ ID NOs: 956-980. In some embodiments, the at least one guide RNA has a crRNA sequence having at least 80% identity to a sequence selected from SEQ ID NOs: 956-980. In some embodiments, the at least one guide RNA has a crRNA sequence having at least 85% identity to a sequence selected from SEQ ID NOs: 956-980. In some embodiments, the at least one guide RNA has a crRNA sequence having at least 90% identity to a sequence selected from SEQ ID NOs: 956-980. In some embodiments, the at least one guide RNA has a crRNA sequence having at least 95% identity to a sequence selected from SEQ ID NOs: 956-980. In some embodiments, the at least one guide RNA has a crRNA sequence selected from SEQ ID NOs: 956-980.

[0337] In some embodiments, the present disclosure provides method for the treatment or prevention of a joint disease or condition in a subject in need thereof. The method includes administering, to a joint of the subject, a pharmaceutical composition including a pharmaceutically effective amount of a composition having one or more nucleic acids encoding a Clustered Regularly Interspaced Short Palindromic Repeats (CRISPR) gene-editing system. The system includes a CRISPR Associated Protein 9 (Cas9) protein, and at least one guide RNA targeting an BCL2 gene, wherein the target sequence is adjacent to a protospacer adjacent motif (PAM) sequence for the Cas9 protein. In some embodiments, the at least one guide RNA includes a crRNA sequence that is complementary to a target sequence in any one of exons of the BCL2 gene. In some embodiments, the at least one guide RNA includes a crRNA sequence that is complementary to a target sequence in one of exons disclosed herein of the BCL2 gene. In some embodiments, the at least one guide RNA has a crRNA sequence having at least 75% identity to a sequence selected from SEQ ID NOs: 956-980. In some embodiments, the at least one guide RNA has a crRNA sequence having at least 80% identity to a sequence selected from SEQ ID NOs: 956-980. In some embodiments, the at least one guide RNA has a crRNA sequence having at least 85% identity to a sequence selected from SEQ ID NOs: 956-980. In some embodiments, the at least one guide RNA has a crRNA sequence having at least 90% identity to a sequence selected from SEQ ID NOs: 956-980. In some embodiments, the at least one guide RNA has a crRNA sequence having at least 95% identity to a sequence selected from SEQ ID NOs: 956-980. In some embodiments, the at least one guide RNA has a crRNA sequence selected from SEQ ID NOs: 956-980. In some embodiments, the joint disease or condition is arthritis, e.g., osteoarthritis. In some embodiments, the administering includes intra-articular injection of the pharmaceutical composition into the joint of the subject.

[0338] In some embodiments, the present disclosure provides a pharmaceutical composition for the treatment or prevention of a joint disease or condition, the composition including a therapeutically effective amount of one or more nucleic acids encoding a Clustered Regularly Interspaced Short Palindromic Repeats (CRISPR) gene-editing system. The system includes a CRISPR Associated Protein 9 (Cas9) protein, and at least one guide RNA targeting an BAX gene, wherein the target sequence is adjacent to a protospacer adjacent motif (PAM) sequence for the Cas9 protein. In some embodiments, the at least one guide RNA includes a crRNA sequence that is complementary to a target sequence in any one of exons of the BAX gene. In some embodiments, the at least one guide RNA includes a crRNA sequence that is complementary to a target sequence in one of exons disclosed herein of the BAX gene. In some embodiments, the at least one guide RNA has a crRNA sequence having at least 75% identity to a sequence selected from SEQ ID NOs: 981-1005. In some embodiments, the at least one guide RNA has a crRNA sequence having at least 80% identity to a sequence selected from SEQ ID NOs: 981-1005. In some embodiments, the at least one guide RNA has a crRNA sequence having at least 85% identity to a sequence selected from SEQ ID NOs: 981-1005. In some embodiments, the at least one guide RNA has a crRNA sequence having at least 90% identity to a sequence selected from SEQ ID NOs: 981-1005. In some embodiments, the at least one guide RNA has a crRNA sequence having at least 95% identity to a sequence selected from SEQ ID NOs: 981-1005. In some embodiments, the at least one guide RNA has a crRNA sequence selected from SEQ ID NOs: 981-1005.

[0339] In some embodiments, the present disclosure provides method for the treatment or prevention of a joint disease or condition in a subject in need thereof. The method includes administering, to a joint of the subject, a pharmaceutical composition including a pharmaceutically effective amount of a composition having one or more nucleic acids encoding a Clustered Regularly Interspaced Short Palindromic Repeats (CRISPR) gene-editing system. The system includes a CRISPR Associated Protein 9 (Cas9) protein, and at least one guide RNA targeting an BAX gene, wherein the target sequence is adjacent to a protospacer adjacent motif (PAM) sequence for the Cas9 protein. In some embodiments, the at least one guide RNA includes a crRNA sequence that is complementary to a target sequence in any one of exons of the BAX gene. In some embodiments, the at least one guide RNA includes a crRNA sequence that is complementary to a target sequence in one of exons disclosed herein of the BAX gene. In some embodiments, the at least one guide RNA has a crRNA sequence having at least 75% identity to a sequence selected from SEQ ID NOs: 981-1005. In some embodiments, the at least one guide RNA has a crRNA sequence having at least 80% identity to a sequence selected from SEQ ID NOs: 981-1005. In some embodiments, the at least one guide RNA has a crRNA sequence having at least 85% identity to a sequence selected from SEQ ID NOs: 981-1005. In some embodiments, the at least one guide RNA has a crRNA sequence having at least 90% identity to a sequence selected from SEQ ID NOs: 981-1005. In some embodiments, the at least one guide RNA has a crRNA sequence having at least 95% identity to a sequence selected from SEQ ID NOs: 981-1005. In some embodiments, the at least one guide RNA has a crRNA sequence selected from SEQ ID NOs: 981-1005. In some embodiments, the joint disease or condition is arthritis, e.g., osteoarthritis. In some embodiments, the administering includes intra-articular injection of the pharmaceutical composition into the joint of the subject.

[0340] In some embodiments, the present disclosure provides a pharmaceutical composition for the treatment or prevention of a joint disease or condition, the composition including a therapeutically effective amount of one or more nucleic acids encoding a Clustered Regularly Interspaced Short Palindromic Repeats (CRISPR) gene-editing system. The system includes a CRISPR Associated Protein 9 (Cas9) protein, and at least one guide RNA targeting an CAT gene, wherein the target sequence is adjacent to a protospacer adjacent motif (PAM) sequence for the Cas9 protein. In some embodiments, the at least one guide RNA includes a crRNA sequence that is complementary to a target sequence in any one of exons of the CAT gene. In some embodiments, the at least one guide RNA includes a crRNA sequence that is complementary to a target sequence in one of exons disclosed herein of the CAT gene. In some embodiments, the at least one guide RNA has a crRNA sequence having at least 75% identity to a sequence selected from SEQ ID NOs: 1006-1030. In some embodiments, the at least one guide RNA has a crRNA sequence having at least 80% identity to a sequence selected from SEQ ID NOs: 1006-1030. In some embodiments, the at least one guide RNA has a crRNA sequence having at least 85% identity to a sequence selected from SEQ ID NOs: 1006-1030. In some embodiments, the at least one guide RNA has a crRNA sequence having at least 90% identity to a sequence selected from SEQ ID NOs: 1006-1030. In some embodiments, the at least one guide RNA has a crRNA sequence having at least 95% identity to a sequence selected from SEQ ID NOs: 1006-1030. In some embodiments, the at least one guide RNA has a crRNA sequence selected from SEQ ID NOs: 1006-1030.

[0341] In some embodiments, the present disclosure provides method for the treatment or prevention of a joint disease or condition in a subject in need thereof. The method includes administering, to a joint of the subject, a pharmaceutical composition including a pharmaceutically effective amount of a composition having one or more nucleic acids encoding a Clustered Regularly Interspaced Short Palindromic Repeats (CRISPR) gene-editing system. The system includes a CRISPR Associated Protein 9 (Cas9) protein, and at least one guide RNA targeting an CAT gene, wherein the target sequence is adjacent to a protospacer adjacent motif (PAM) sequence for the Cas9 protein. In some embodiments, the at least one guide RNA includes a crRNA sequence that is complementary to a target sequence in any one of exons of the CAT gene. In some embodiments, the at least one guide RNA includes a crRNA sequence that is complementary to a target sequence in one of exons disclosed herein of the CAT gene. In some embodiments, the at least one guide RNA has a crRNA sequence having at least 75% identity to a sequence selected from SEQ ID NOs: 1006-1030. In some embodiments, the at least one guide RNA has a crRNA sequence having at least 80% identity to a sequence selected from SEQ ID NOs: 1006-1030. In some embodiments, the at least one guide RNA has a crRNA sequence having at least 85% identity to a sequence selected from SEQ ID NOs: 1006-1030. In some embodiments, the at least one guide RNA has a crRNA sequence having at least 90% identity to a sequence selected from SEQ ID NOs: 1006-1030. In some embodiments, the at least one guide RNA has a crRNA sequence having at least 95% identity to a sequence selected from SEQ ID NOs: 1006-1030. In some embodiments, the at least one guide RNA has a crRNA sequence selected from SEQ ID NOs: 1006-1030. In some embodiments, the joint disease or condition is arthritis, e.g., osteoarthritis. In some embodiments, the administering includes intra-articular injection of the pharmaceutical composition into the joint of the subject.

[0342] In some embodiments, the present disclosure provides a pharmaceutical composition for the treatment or prevention of a joint disease or condition, the composition including a therapeutically effective amount of one or more nucleic acids encoding a Clustered Regularly Interspaced Short Palindromic Repeats (CRISPR) gene-editing system. The system includes a CRISPR Associated Protein 9 (Cas9) protein, and at least one guide RNA targeting an MAPK8 gene, wherein the target sequence is adjacent to a protospacer adjacent motif (PAM) sequence for the Cas9 protein. In some embodiments, the at least one guide RNA includes a crRNA sequence that is complementary to a target sequence in any one of exons of the MAPK8 gene. In some embodiments, the at least one guide RNA includes a crRNA sequence that is complementary to a target sequence in one of exons disclosed herein of the MAPK8 gene. In some embodiments, the at least one guide RNA has a crRNA sequence having at least 75% identity to a sequence selected from SEQ ID NOs: 1031-1055. In some embodiments, the at least one guide RNA has a crRNA sequence having at least 80% identity to a sequence selected from SEQ ID NOs: 1031-1055. In some embodiments, the at least one guide RNA has a crRNA sequence having at least 85% identity to a sequence selected from SEQ ID NOs: 1031-1055. In some embodiments, the at least one guide RNA has a crRNA sequence having at least 90% identity to a sequence selected from SEQ ID NOs: 1031-1055. In some embodiments, the at least one guide RNA has a crRNA sequence having at least 95% identity to a sequence selected from SEQ ID NOs: 1031-1055. In some embodiments, the at least one guide RNA has a crRNA sequence selected from SEQ ID NOs: 1031-1055.

[0343] In some embodiments, the present disclosure provides method for the treatment or prevention of a joint disease or condition in a subject in need thereof. The method includes administering, to a joint of the subject, a pharmaceutical composition including a pharmaceutically effective amount of a composition having one or more nucleic acids encoding a Clustered Regularly Interspaced Short Palindromic Repeats (CRISPR) gene-editing system. The system includes a CRISPR Associated Protein 9 (Cas9) protein, and at least one guide RNA targeting an MAPK8 gene, wherein the target sequence is adjacent to a protospacer adjacent motif (PAM) sequence for the Cas9 protein. In some embodiments, the at least one guide RNA includes a crRNA sequence that is complementary to a target sequence in any one of exons of the MAPK8 gene. In some embodiments, the at least one guide RNA includes a crRNA sequence that is complementary to a target sequence in one of exons disclosed herein of the MAPK8 gene. In some embodiments, the at least one guide RNA has a crRNA sequence having at least 75% identity to a sequence selected from SEQ ID NOs: 1031-1055. In some embodiments, the at least one guide RNA has a crRNA sequence having at least 80% identity to a sequence selected from SEQ ID NOs: 1031-1055. In some embodiments, the at least one guide RNA has a crRNA sequence having at least 85% identity to a sequence selected from SEQ ID NOs: 1031-1055. In some embodiments, the at least one guide RNA has a crRNA sequence having at least 90% identity to a sequence selected from SEQ ID NOs: 1031-1055. In some embodiments, the at least one guide RNA has a crRNA sequence having at least 95% identity to a sequence selected from SEQ ID NOs: 1031-1055. In some embodiments, the at least one guide RNA has a crRNA sequence selected from SEQ ID NOs: 1031-1055. In some embodiments, the joint disease or condition is arthritis, e.g., osteoarthritis. In some embodiments, the administering includes intra-articular injection of the pharmaceutical composition into the joint of the subject.

[0344] In some embodiments, the present disclosure provides a pharmaceutical composition for the treatment or prevention of a joint disease or condition, the composition including a therapeutically effective amount of one or more nucleic acids encoding a Clustered Regularly Interspaced Short Palindromic Repeats (CRISPR) gene-editing system. The system includes a CRISPR Associated Protein 9 (Cas9) protein, and at least one guide RNA targeting an COQ10A gene, wherein the target sequence is adjacent to a protospacer adjacent motif (PAM) sequence for the Cas9 protein. In some embodiments, the at least one guide RNA includes a crRNA sequence that is complementary to a target sequence in any one of exons of the COQ10A gene. In some embodiments, the at least one guide RNA includes a crRNA sequence that is complementary to a target sequence in one of exons disclosed herein of the COQ10A gene. In some embodiments, the at least one guide RNA has a crRNA sequence having at least 75% identity to a sequence selected from SEQ ID NOs: 1056-1080. In some embodiments, the at least one guide RNA has a crRNA sequence having at least 80% identity to a sequence selected from SEQ ID NOs: 1056-1080. In some embodiments, the at least one guide RNA has a crRNA sequence having at least 85% identity to a sequence selected from SEQ ID NOs: 1056-1080. In some embodiments, the at least one guide RNA has a crRNA sequence having at least 90% identity to a sequence selected from SEQ ID NOs: 1056-1080. In some embodiments, the at least one guide RNA has a crRNA sequence having at least 95% identity to a sequence selected from SEQ ID NOs: 1056-1080. In some embodiments, the at least one guide RNA has a crRNA sequence selected from SEQ ID NOs: 1056-1080.

[0345] In some embodiments, the present disclosure provides method for the treatment or prevention of a joint disease or condition in a subject in need thereof. The method includes administering, to a joint of the subject, a pharmaceutical composition including a pharmaceutically effective amount of a composition having one or more nucleic acids encoding a Clustered Regularly Interspaced Short Palindromic Repeats (CRISPR) gene-editing system. The system includes a CRISPR Associated Protein 9 (Cas9) protein, and at least one guide RNA targeting an COQ10A gene, wherein the target sequence is adjacent to a protospacer adjacent motif (PAM) sequence for the Cas9 protein. In some embodiments, the at least one guide RNA includes a crRNA sequence that is complementary to a target sequence in any one of exons of the COQ10A gene. In some embodiments, the at least one guide RNA includes a crRNA sequence that is complementary to a target sequence in one of exons disclosed herein of the COQ10A gene. In some embodiments, the at least one guide RNA has a crRNA sequence having at least 75% identity to a sequence selected from SEQ ID NOs: 1056-1080. In some embodiments, the at least one guide RNA has a crRNA sequence having at least 80% identity to a sequence selected from SEQ ID NOs: 1056-1080. In some embodiments, the at least one guide RNA has a crRNA sequence having at least 85% identity to a sequence selected from SEQ ID NOs: 1056-1080. In some embodiments, the at least one guide RNA has a crRNA sequence having at least 90% identity to a sequence selected from SEQ ID NOs: 1056-1080. In some embodiments, the at least one guide RNA has a crRNA sequence having at least 95% identity to a sequence selected from SEQ ID NOs: 1056-1080. In some embodiments, the at least one guide RNA has a crRNA sequence selected from SEQ ID NOs: 1056-1080. In some embodiments, the joint disease or condition is arthritis, e.g., osteoarthritis. In some embodiments, the administering includes intra-articular injection of the pharmaceutical composition into the joint of the subject.

[0346] In some embodiments, the present disclosure provides a pharmaceutical composition for the treatment or prevention of a joint disease or condition, the composition including a therapeutically effective amount of one or more nucleic acids encoding a Clustered Regularly Interspaced Short Palindromic Repeats (CRISPR) gene-editing system. The system includes a CRISPR Associated Protein 9 (Cas9) protein, and at least one guide RNA targeting an COQ10B gene, wherein the target sequence is adjacent to a protospacer adjacent motif (PAM) sequence for the Cas9 protein. In some embodiments, the at least one guide RNA includes a crRNA sequence that is complementary to a target sequence in any one of exons of the COQ10B gene. In some embodiments, the at least one guide RNA includes a crRNA sequence that is complementary to a target sequence in one of exons disclosed herein of the COQ10B gene. In some embodiments, the at least one guide RNA has a crRNA sequence having at least 75% identity to a sequence selected from SEQ ID NOs: 1081-1105. In some embodiments, the at least one guide RNA has a crRNA sequence having at least 80% identity to a sequence selected from SEQ ID NOs: 1081-1105. In some embodiments, the at least one guide RNA has a crRNA sequence having at least 85% identity to a sequence selected from SEQ ID NOs: 1081-1105. In some embodiments, the at least one guide RNA has a crRNA sequence having at least 90% identity to a sequence selected from SEQ ID NOs: 1081-1105. In some embodiments, the at least one guide RNA has a crRNA sequence having at least 95% identity to a sequence selected from SEQ ID NOs: 1081-1105. In some embodiments, the at least one guide RNA has a crRNA sequence selected from SEQ ID NOs: 1081-1105.

[0347] In some embodiments, the present disclosure provides method for the treatment or prevention of a joint disease or condition in a subject in need thereof. The method includes administering, to a joint of the subject, a pharmaceutical composition including a pharmaceutically effective amount of a composition having one or more nucleic acids encoding a Clustered Regularly Interspaced Short Palindromic Repeats (CRISPR) gene-editing system. The system includes a CRISPR Associated Protein 9 (Cas9) protein, and at least one guide RNA targeting an COQ10B gene, wherein the target sequence is adjacent to a protospacer adjacent motif (PAM) sequence for the Cas9 protein. In some embodiments, the at least one guide RNA includes a crRNA sequence that is complementary to a target sequence in any one of exons of the COQ10B gene. In some embodiments, the at least one guide RNA includes a crRNA sequence that is complementary to a target sequence in one of exons disclosed herein of the COQ10B gene. In some embodiments, the at least one guide RNA has a crRNA sequence having at least 75% identity to a sequence selected from SEQ ID NOs: 1081-1105. In some embodiments, the at least one guide RNA has a crRNA sequence having at least 80% identity to a sequence selected from SEQ ID NOs: 1081-1105. In some embodiments, the at least one guide RNA has a crRNA sequence having at least 85% identity to a sequence selected from SEQ ID NOs: 1081-1105. In some embodiments, the at least one guide RNA has a crRNA sequence having at least 90% identity to a sequence selected from SEQ ID NOs: 1081-1105. In some embodiments, the at least one guide RNA has a crRNA sequence having at least 95% identity to a sequence selected from SEQ ID NOs: 1081-1105. In some embodiments, the at least one guide RNA has a crRNA sequence selected from SEQ ID NOs: 1081-1105. In some embodiments, the joint disease or condition is arthritis, e.g., osteoarthritis. In some embodiments, the administering includes intra-articular injection of the pharmaceutical composition into the joint of the subject.

[0348] In some embodiments, the present disclosure provides a pharmaceutical composition for the treatment or prevention of a joint disease or condition, the composition including a therapeutically effective amount of one or more nucleic acids encoding a Clustered Regularly Interspaced Short Palindromic Repeats (CRISPR) gene-editing system. The system includes a CRISPR Associated Protein 9 (Cas9) protein, and at least one guide RNA targeting an CYP2E1 gene, wherein the target sequence is adjacent to a protospacer adjacent motif (PAM) sequence for the Cas9 protein. In some embodiments, the at least one guide RNA includes a crRNA sequence that is complementary to a target sequence in any one of exons of the CYP2E1 gene. In some embodiments, the at least one guide RNA includes a crRNA sequence that is complementary to a target sequence in one of exons disclosed herein of the CYP2E1 gene. In some embodiments, the at least one guide RNA has a crRNA sequence having at least 75% identity to a sequence selected from SEQ ID NOs: 1106-1130. In some embodiments, the at least one guide RNA has a crRNA sequence having at least 80% identity to a sequence selected from SEQ ID NOs: 1106-1130. In some embodiments, the at least one guide RNA has a crRNA sequence having at least 85% identity to a sequence selected from SEQ ID NOs: 1106-1130. In some embodiments, the at least one guide RNA has a crRNA sequence having at least 90% identity to a sequence selected from SEQ ID NOs: 1106-1130. In some embodiments, the at least one guide RNA has a crRNA sequence having at least 95% identity to a sequence selected from SEQ ID NOs: 1106-1130. In some embodiments, the at least one guide RNA has a crRNA sequence selected from SEQ ID NOs: 1106-1130.

[0349] In some embodiments, the present disclosure provides method for the treatment or prevention of a joint disease or condition in a subject in need thereof. The method includes administering, to a joint of the subject, a pharmaceutical composition including a pharmaceutically effective amount of a composition having one or more nucleic acids encoding a Clustered Regularly Interspaced Short Palindromic Repeats (CRISPR) gene-editing system. The system includes a CRISPR Associated Protein 9 (Cas9) protein, and at least one guide RNA targeting an CYP2E1 gene, wherein the target sequence is adjacent to a protospacer adjacent motif (PAM) sequence for the Cas9 protein. In some embodiments, the at least one guide RNA includes a crRNA sequence that is complementary to a target sequence in any one of exons of the CYP2E1 gene. In some embodiments, the at least one guide RNA includes a crRNA sequence that is complementary to a target sequence in one of exons disclosed herein of the CYP2E1 gene. In some embodiments, the at least one guide RNA has a crRNA sequence having at least 75% identity to a sequence selected from SEQ ID NOs: 1106-1130. In some embodiments, the at least one guide RNA has a crRNA sequence having at least 80% identity to a sequence selected from SEQ ID NOs: 1106-1130. In some embodiments, the at least one guide RNA has a crRNA sequence having at least 85% identity to a sequence selected from SEQ ID NOs: 1106-1130. In some embodiments, the at least one guide RNA has a crRNA sequence having at least 90% identity to a sequence selected from SEQ ID NOs: 1106-1130. In some embodiments, the at least one guide RNA has a crRNA sequence having at least 95% identity to a sequence selected from SEQ ID NOs: 1106-1130. In some embodiments, the at least one guide RNA has a crRNA sequence selected from SEQ ID NOs: 1106-1130. In some embodiments, the joint disease or condition is arthritis, e.g., osteoarthritis. In some embodiments, the administering includes intra-articular injection of the pharmaceutical composition into the joint of the subject.

[0350] In some embodiments, the present disclosure provides a pharmaceutical composition for the treatment or prevention of a joint disease or condition, the composition including a therapeutically effective amount of one or more nucleic acids encoding a Clustered Regularly Interspaced Short Palindromic Repeats (CRISPR) gene-editing system. The system includes a CRISPR Associated Protein 9 (Cas9) protein, and at least one guide RNA targeting an CYCS gene, wherein the target sequence is adjacent to a protospacer adjacent motif (PAM) sequence for the Cas9 protein. In some embodiments, the at least one guide RNA includes a crRNA sequence that is complementary to a target sequence in any one of exons of the CYCS gene. In some embodiments, the at least one guide RNA includes a crRNA sequence that is complementary to a target sequence in one of exons disclosed herein of the CYCS gene. In some embodiments, the at least one guide RNA has a crRNA sequence having at least 75% identity to a sequence selected from SEQ ID NOs: 1131-1155. In some embodiments, the at least one guide RNA has a crRNA sequence having at least 80% identity to a sequence selected from SEQ ID NOs: 1131-1155. In some embodiments, the at least one guide RNA has a crRNA sequence having at least 85% identity to a sequence selected from SEQ ID NOs: 1131-1155. In some embodiments, the at least one guide RNA has a crRNA sequence having at least 90% identity to a sequence selected from SEQ ID NOs: 1131-1155. In some embodiments, the at least one guide RNA has a crRNA sequence having at least 95% identity to a sequence selected from SEQ ID NOs: 1131-1155. In some embodiments, the at least one guide RNA has a crRNA sequence selected from SEQ ID NOs: 1131-1155.

[0351] In some embodiments, the present disclosure provides method for the treatment or prevention of a joint disease or condition in a subject in need thereof. The method includes administering, to a joint of the subject, a pharmaceutical composition including a pharmaceutically effective amount of a composition having one or more nucleic acids encoding a Clustered Regularly Interspaced Short Palindromic Repeats (CRISPR) gene-editing system. The system includes a CRISPR Associated Protein 9 (Cas9) protein, and at least one guide RNA targeting an CYCS gene, wherein the target sequence is adjacent to a protospacer adjacent motif (PAM) sequence for the Cas9 protein. In some embodiments, the at least one guide RNA includes a crRNA sequence that is complementary to a target sequence in any one of exons of the CYCS gene. In some embodiments, the at least one guide RNA includes a crRNA sequence that is complementary to a target sequence in one of exons disclosed herein of the CYCS gene. In some embodiments, the at least one guide RNA has a crRNA sequence having at least 75% identity to a sequence selected from SEQ ID NOs: 1131-1155. In some embodiments, the at least one guide RNA has a crRNA sequence having at least 80% identity to a sequence selected from SEQ ID NOs: 1131-1155. In some embodiments, the at least one guide RNA has a crRNA sequence having at least 85% identity to a sequence selected from SEQ ID NOs: 1131-1155. In some embodiments, the at least one guide RNA has a crRNA sequence having at least 90% identity to a sequence selected from SEQ ID NOs: 1131-1155. In some embodiments, the at least one guide RNA has a crRNA sequence having at least 95% identity to a sequence selected from SEQ ID NOs: 1131-1155. In some embodiments, the at least one guide RNA has a crRNA sequence selected from SEQ ID NOs: 1131-1155. In some embodiments, the joint disease or condition is arthritis, e.g., osteoarthritis. In some embodiments, the administering includes intra-articular injection of the pharmaceutical composition into the joint of the subject.

[0352] In some embodiments, the present disclosure provides a pharmaceutical composition for the treatment or prevention of a joint disease or condition, the composition including a therapeutically effective amount of one or more nucleic acids encoding a Clustered Regularly Interspaced Short Palindromic Repeats (CRISPR) gene-editing system. The system includes a CRISPR Associated Protein 9 (Cas9) protein, and at least one guide RNA targeting an ATP5MF gene, wherein the target sequence is adjacent to a protospacer adjacent motif (PAM) sequence for the Cas9 protein. In some embodiments, the at least one guide RNA includes a crRNA sequence that is complementary to a target sequence in any one of exons of the ATP5MF gene. In some embodiments, the at least one guide RNA includes a crRNA sequence that is complementary to a target sequence in one of exons disclosed herein of the ATP5MF gene. In some embodiments, the at least one guide RNA has a crRNA sequence having at least 75% identity to a sequence selected from SEQ ID NOs: 1156-1180. In some embodiments, the at least one guide RNA has a crRNA sequence having at least 80% identity to a sequence selected from SEQ ID NOs: 1156-1180. In some embodiments, the at least one guide RNA has a crRNA sequence having at least 85% identity to a sequence selected from SEQ ID NOs: 1156-1180. In some embodiments, the at least one guide RNA has a crRNA sequence having at least 90% identity to a sequence selected from SEQ ID NOs: 1156-1180. In some embodiments, the at least one guide RNA has a crRNA sequence having at least 95% identity to a sequence selected from SEQ ID NOs: 1156-1180. In some embodiments, the at least one guide RNA has a crRNA sequence selected from SEQ ID NOs: 1156-1180.

[0353] In some embodiments, the present disclosure provides method for the treatment or prevention of a joint disease or condition in a subject in need thereof. The method includes administering, to a joint of the subject, a pharmaceutical composition including a pharmaceutically effective amount of a composition having one or more nucleic acids encoding a Clustered Regularly Interspaced Short Palindromic Repeats (CRISPR) gene-editing system. The system includes a CRISPR Associated Protein 9 (Cas9) protein, and at least one guide RNA targeting an ATP5MF gene, wherein the target sequence is adjacent to a protospacer adjacent motif (PAM) sequence for the Cas9 protein. In some embodiments, the at least one guide RNA includes a crRNA sequence that is complementary to a target sequence in any one of exons of the ATP5MF gene. In some embodiments, the at least one guide RNA includes a crRNA sequence that is complementary to a target sequence in one of exons disclosed herein of the ATP5MF gene. In some embodiments, the at least one guide RNA has a crRNA sequence having at least 75% identity to a sequence selected from SEQ ID NOs: 1156-1180. In some embodiments, the at least one guide RNA has a crRNA sequence having at least 80% identity to a sequence selected from SEQ ID NOs: 1156-1180. In some embodiments, the at least one guide RNA has a crRNA sequence having at least 85% identity to a sequence selected from SEQ ID NOs: 1156-1180. In some embodiments, the at least one guide RNA has a crRNA sequence having at least 90% identity to a sequence selected from SEQ ID NOs: 1156-1180. In some embodiments, the at least one guide RNA has a crRNA sequence having at least 95% identity to a sequence selected from SEQ ID NOs: 1156-1180. In some embodiments, the at least one guide RNA has a crRNA sequence selected from SEQ ID NOs: 1156-1180. In some embodiments, the joint disease or condition is arthritis, e.g., osteoarthritis. In some embodiments, the administering includes intra-articular injection of the pharmaceutical composition into the joint of the subject.

[0354] In some embodiments, the present disclosure provides a pharmaceutical composition for the treatment or prevention of a joint disease or condition, the composition including a therapeutically effective amount of one or more nucleic acids encoding a Clustered Regularly Interspaced Short Palindromic Repeats (CRISPR) gene-editing system. The system includes a CRISPR Associated Protein 9 (Cas9) protein, and at least one guide RNA targeting an FTH1 gene, wherein the target sequence is adjacent to a protospacer adjacent motif (PAM) sequence for the Cas9 protein. In some embodiments, the at least one guide RNA includes a crRNA sequence that is complementary to a target sequence in any one of exons of the FTH1 gene. In some embodiments, the at least one guide RNA includes a crRNA sequence that is complementary to a target sequence in one of exons disclosed herein of the FTH1 gene. In some embodiments, the at least one guide RNA has a crRNA sequence having at least 75% identity to a sequence selected from SEQ ID NOs: 1181-1205. In some embodiments, the at least one guide RNA has a crRNA sequence having at least 80% identity to a sequence selected from SEQ ID NOs: 1181-1205. In some embodiments, the at least one guide RNA has a crRNA sequence having at least 85% identity to a sequence selected from SEQ ID NOs: 1181-1205. In some embodiments, the at least one guide RNA has a crRNA sequence having at least 90% identity to a sequence selected from SEQ ID NOs: 1181-1205. In some embodiments, the at least one guide RNA has a crRNA sequence having at least 95% identity to a sequence selected from SEQ ID NOs: 1181-1205. In some embodiments, the at least one guide RNA has a crRNA sequence selected from SEQ ID NOs: 1181-1205.

[0355] In some embodiments, the present disclosure provides method for the treatment or prevention of a joint disease or condition in a subject in need thereof. The method includes administering, to a joint of the subject, a pharmaceutical composition including a pharmaceutically effective amount of a composition having one or more nucleic acids encoding a Clustered Regularly Interspaced Short Palindromic Repeats (CRISPR) gene-editing system. The system includes a CRISPR Associated Protein 9 (Cas9) protein, and at least one guide RNA targeting an FTH1 gene, wherein the target sequence is adjacent to a protospacer adjacent motif (PAM) sequence for the Cas9 protein. In some embodiments, the at least one guide RNA includes a crRNA sequence that is complementary to a target sequence in any one of exons of the FTH1 gene. In some embodiments, the at least one guide RNA includes a crRNA sequence that is complementary to a target sequence in one of exons disclosed herein of the FTH1 gene. In some embodiments, the at least one guide RNA has a crRNA sequence having at least 75% identity to a sequence selected from SEQ ID NOs: 1181-1205. In some embodiments, the at least one guide RNA has a crRNA sequence having at least 80% identity to a sequence selected from SEQ ID NOs: 1181-1205. In some embodiments, the at least one guide RNA has a crRNA sequence having at least 85% identity to a sequence selected from SEQ ID NOs: 1181-1205. In some embodiments, the at least one guide RNA has a crRNA sequence having at least 90% identity to a sequence selected from SEQ ID NOs: 1181-1205. In some embodiments, the at least one guide RNA has a crRNA sequence having at least 95% identity to a sequence selected from SEQ ID NOs: 1181-1205. In some embodiments, the at least one guide RNA has a crRNA sequence selected from SEQ ID NOs: 1181-1205. In some embodiments, the joint disease or condition is arthritis, e.g., osteoarthritis. In some embodiments, the administering includes intra-articular injection of the pharmaceutical composition into the joint of the subject.

[0356] In some embodiments, the present disclosure provides a pharmaceutical composition for the treatment or prevention of a joint disease or condition, the composition including a therapeutically effective amount of one or more nucleic acids encoding a Clustered Regularly Interspaced Short Palindromic Repeats (CRISPR) gene-editing system. The system includes a CRISPR Associated Protein 9 (Cas9) protein, and at least one guide RNA targeting an G6PD gene, wherein the target sequence is adjacent to a protospacer adjacent motif (PAM) sequence for the Cas9 protein. In some embodiments, the at least one guide RNA includes a crRNA sequence that is complementary to a target sequence in any one of exons of the G6PD gene. In some embodiments, the at least one guide RNA includes a crRNA sequence that is complementary to a target sequence in one of exons disclosed herein of the G6PD gene. In some embodiments, the at least one guide RNA has a crRNA sequence having at least 75% identity to a sequence selected from SEQ ID NOs: 1206-1230. In some embodiments, the at least one guide RNA has a crRNA sequence having at least 80% identity to a sequence selected from SEQ ID NOs: 1206-1230. In some embodiments, the at least one guide RNA has a crRNA sequence having at least 85% identity to a sequence selected from SEQ ID NOs: 1206-1230. In some embodiments, the at least one guide RNA has a crRNA sequence having at least 90% identity to a sequence selected from SEQ ID NOs: 1206-1230. In some embodiments, the at least one guide RNA has a crRNA sequence having at least 95% identity to a sequence selected from SEQ ID NOs: 1206-1230. In some embodiments, the at least one guide RNA has a crRNA sequence selected from SEQ ID NOs: 1206-1230.

[0357] In some embodiments, the present disclosure provides method for the treatment or prevention of a joint disease or condition in a subject in need thereof. The method includes administering, to a joint of the subject, a pharmaceutical composition including a pharmaceutically effective amount of a composition having one or more nucleic acids encoding a Clustered Regularly Interspaced Short Palindromic Repeats (CRISPR) gene-editing system. The system includes a CRISPR Associated Protein 9 (Cas9) protein, and at least one guide RNA targeting an G6PD gene, wherein the target sequence is adjacent to a protospacer adjacent motif (PAM) sequence for the Cas9 protein. In some embodiments, the at least one guide RNA includes a crRNA sequence that is complementary to a target sequence in any one of exons of the G6PD gene. In some embodiments, the at least one guide RNA includes a crRNA sequence that is complementary to a target sequence in one of exons disclosed herein of the G6PD gene. In some embodiments, the at least one guide RNA has a crRNA sequence having at least 75% identity to a sequence selected from SEQ ID NOs: 1206-1230. In some embodiments, the at least one guide RNA has a crRNA sequence having at least 80% identity to a sequence selected from SEQ ID NOs: 1206-1230. In some embodiments, the at least one guide RNA has a crRNA sequence having at least 85% identity to a sequence selected from SEQ ID NOs: 1206-1230. In some embodiments, the at least one guide RNA has a crRNA sequence having at least 90% identity to a sequence selected from SEQ ID NOs: 1206-1230. In some embodiments, the at least one guide RNA has a crRNA sequence having at least 95% identity to a sequence selected from SEQ ID NOs: 1206-1230. In some embodiments, the at least one guide RNA has a crRNA sequence selected from SEQ ID NOs: 1206-1230. In some embodiments, the joint disease or condition is arthritis, e.g., osteoarthritis. In some embodiments, the administering includes intra-articular injection of the pharmaceutical composition into the joint of the subject.

[0358] In some embodiments, the present disclosure provides a pharmaceutical composition for the treatment or prevention of a joint disease or condition, the composition including a therapeutically effective amount of one or more nucleic acids encoding a Clustered Regularly Interspaced Short Palindromic Repeats (CRISPR) gene-editing system. The system includes a CRISPR Associated Protein 9 (Cas9) protein, and at least one guide RNA targeting an GCLC gene, wherein the target sequence is adjacent to a protospacer adjacent motif (PAM) sequence for the Cas9 protein. In some embodiments, the at least one guide RNA includes a crRNA sequence that is complementary to a target sequence in any one of exons of the GCLC gene. In some embodiments, the at least one guide RNA includes a crRNA sequence that is complementary to a target sequence in one of exons disclosed herein of the GCLC gene. In some embodiments, the at least one guide RNA has a crRNA sequence having at least 75% identity to a sequence selected from SEQ ID NOs: 1231-1255. In some embodiments, the at least one guide RNA has a crRNA sequence having at least 80% identity to a sequence selected from SEQ ID NOs: 1231-1255. In some embodiments, the at least one guide RNA has a crRNA sequence having at least 85% identity to a sequence selected from SEQ ID NOs: 1231-1255. In some embodiments, the at least one guide RNA has a crRNA sequence having at least 90% identity to a sequence selected from SEQ ID NOs: 1231-1255. In some embodiments, the at least one guide RNA has a crRNA sequence having at least 95% identity to a sequence selected from SEQ ID NOs: 1231-1255. In some embodiments, the at least one guide RNA has a crRNA sequence selected from SEQ ID NOs: 1231-1255.

[0359] In some embodiments, the present disclosure provides method for the treatment or prevention of a joint disease or condition in a subject in need thereof. The method includes administering, to a joint of the subject, a pharmaceutical composition including a pharmaceutically effective amount of a composition having one or more nucleic acids encoding a Clustered Regularly Interspaced Short Palindromic Repeats (CRISPR) gene-editing system. The system includes a CRISPR Associated Protein 9 (Cas9) protein, and at least one guide RNA targeting an GCLC gene, wherein the target sequence is adjacent to a protospacer adjacent motif (PAM) sequence for the Cas9 protein. In some embodiments, the at least one guide RNA includes a crRNA sequence that is complementary to a target sequence in any one of exons of the GCLC gene. In some embodiments, the at least one guide RNA includes a crRNA sequence that is complementary to a target sequence in one of exons disclosed herein of the GCLC gene. In some embodiments, the at least one guide RNA has a crRNA sequence having at least 75% identity to a sequence selected from SEQ ID NOs: 1231-1255. In some embodiments, the at least one guide RNA has a crRNA sequence having at least 80% identity to a sequence selected from SEQ ID NOs: 1231-1255. In some embodiments, the at least one guide RNA has a crRNA sequence having at least 85% identity to a sequence selected from SEQ ID NOs: 1231-1255. In some embodiments, the at least one guide RNA has a crRNA sequence having at least 90% identity to a sequence selected from SEQ ID NOs: 1231-1255. In some embodiments, the at least one guide RNA has a crRNA sequence having at least 95% identity to a sequence selected from SEQ ID NOs: 1231-1255. In some embodiments, the at least one guide RNA has a crRNA sequence selected from SEQ ID NOs: 1231-1255. In some embodiments, the joint disease or condition is arthritis, e.g., osteoarthritis. In some embodiments, the administering includes intra-articular injection of the pharmaceutical composition into the joint of the subject.

[0360] In some embodiments, the present disclosure provides a pharmaceutical composition for the treatment or prevention of a joint disease or condition, the composition including a therapeutically effective amount of one or more nucleic acids encoding a Clustered Regularly Interspaced Short Palindromic Repeats (CRISPR) gene-editing system. The system includes a CRISPR Associated Protein 9 (Cas9) protein, and at least one guide RNA targeting an GSS gene, wherein the target sequence is adjacent to a protospacer adjacent motif (PAM) sequence for the Cas9 protein. In some embodiments, the at least one guide RNA includes a crRNA sequence that is complementary to a target sequence in any one of exons of the GSS gene. In some embodiments, the at least one guide RNA includes a crRNA sequence that is complementary to a target sequence in one of exons disclosed herein of the GSS gene. In some embodiments, the at least one guide RNA has a crRNA sequence having at least 75% identity to a sequence selected from SEQ ID NOs: 1256-1280. In some embodiments, the at least one guide RNA has a crRNA sequence having at least 80% identity to a sequence selected from SEQ ID NOs: 1256-1280. In some embodiments, the at least one guide RNA has a crRNA sequence having at least 85% identity to a sequence selected from SEQ ID NOs: 1256-1280. In some embodiments, the at least one guide RNA has a crRNA sequence having at least 90% identity to a sequence selected from SEQ ID NOs: 1256-1280. In some embodiments, the at least one guide RNA has a crRNA sequence having at least 95% identity to a sequence selected from SEQ ID NOs: 1256-1280. In some embodiments, the at least one guide RNA has a crRNA sequence selected from SEQ ID NOs: 1256-1280.

[0361] In some embodiments, the present disclosure provides method for the treatment or prevention of a joint disease or condition in a subject in need thereof. The method includes administering, to a joint of the subject, a pharmaceutical composition including a pharmaceutically effective amount of a composition having one or more nucleic acids encoding a Clustered Regularly Interspaced Short Palindromic Repeats (CRISPR) gene-editing system. The system includes a CRISPR Associated Protein 9 (Cas9) protein, and at least one guide RNA targeting an GSS gene, wherein the target sequence is adjacent to a protospacer adjacent motif (PAM) sequence for the Cas9 protein. In some embodiments, the at least one guide RNA includes a crRNA sequence that is complementary to a target sequence in any one of exons of the GSS gene. In some embodiments, the at least one guide RNA includes a crRNA sequence that is complementary to a target sequence in one of exons disclosed herein of the GSS gene. In some embodiments, the at least one guide RNA has a crRNA sequence having at least 75% identity to a sequence selected from SEQ ID NOs: 1256-1280. In some embodiments, the at least one guide RNA has a crRNA sequence having at least 80% identity to a sequence selected from SEQ ID NOs: 1256-1280. In some embodiments, the at least one guide RNA has a crRNA sequence having at least 85% identity to a sequence selected from SEQ ID NOs: 1256-1280. In some embodiments, the at least one guide RNA has a crRNA sequence having at least 90% identity to a sequence selected from SEQ ID NOs: 1256-1280. In some embodiments, the at least one guide RNA has a crRNA sequence having at least 95% identity to a sequence selected from SEQ ID NOs: 1256-1280. In some embodiments, the at least one guide RNA has a crRNA sequence selected from SEQ ID NOs: 1256-1280. In some embodiments, the joint disease or condition is arthritis, e.g., osteoarthritis. In some embodiments, the administering includes intra-articular injection of the pharmaceutical composition into the joint of the subject.

[0362] In some embodiments, the present disclosure provides a pharmaceutical composition for the treatment or prevention of a joint disease or condition, the composition including a therapeutically effective amount of one or more nucleic acids encoding a Clustered Regularly Interspaced Short Palindromic Repeats (CRISPR) gene-editing system. The system includes a CRISPR Associated Protein 9 (Cas9) protein, and at least one guide RNA targeting an GPX1 gene, wherein the target sequence is adjacent to a protospacer adjacent motif (PAM) sequence for the Cas9 protein. In some embodiments, the at least one guide RNA includes a crRNA sequence that is complementary to a target sequence in any one of exons of the GPX1 gene. In some embodiments, the at least one guide RNA includes a crRNA sequence that is complementary to a target sequence in one of exons disclosed herein of the GPX1 gene. In some embodiments, the at least one guide RNA has a crRNA sequence having at least 75% identity to a sequence selected from SEQ ID NOs: 1281-1305. In some embodiments, the at least one guide RNA has a crRNA sequence having at least 80% identity to a sequence selected from SEQ ID NOs: 1281-1305. In some embodiments, the at least one guide RNA has a crRNA sequence having at least 85% identity to a sequence selected from SEQ ID NOs: 1281-1305. In some embodiments, the at least one guide RNA has a crRNA sequence having at least 90% identity to a sequence selected from SEQ ID NOs: 1281-1305. In some embodiments, the at least one guide RNA has a crRNA sequence having at least 95% identity to a sequence selected from SEQ ID NOs: 1281-1305. In some embodiments, the at least one guide RNA has a crRNA sequence selected from SEQ ID NOs: 1281-1305.

[0363] In some embodiments, the present disclosure provides method for the treatment or prevention of a joint disease or condition in a subject in need thereof. The method includes administering, to a joint of the subject, a pharmaceutical composition including a pharmaceutically effective amount of a composition having one or more nucleic acids encoding a Clustered Regularly Interspaced Short Palindromic Repeats (CRISPR) gene-editing system. The system includes a CRISPR Associated Protein 9 (Cas9) protein, and at least one guide RNA targeting an GPX1 gene, wherein the target sequence is adjacent to a protospacer adjacent motif (PAM) sequence for the Cas9 protein. In some embodiments, the at least one guide RNA includes a crRNA sequence that is complementary to a target sequence in any one of exons of the GPX1 gene. In some embodiments, the at least one guide RNA includes a crRNA sequence that is complementary to a target sequence in one of exons disclosed herein of the GPX1 gene. In some embodiments, the at least one guide RNA has a crRNA sequence having at least 75% identity to a sequence selected from SEQ ID NOs: 1281-1305. In some embodiments, the at least one guide RNA has a crRNA sequence having at least 80% identity to a sequence selected from SEQ ID NOs: 1281-1305. In some embodiments, the at least one guide RNA has a crRNA sequence having at least 85% identity to a sequence selected from SEQ ID NOs: 1281-1305. In some embodiments, the at least one guide RNA has a crRNA sequence having at least 90% identity to a sequence selected from SEQ ID NOs: 1281-1305. In some embodiments, the at least one guide RNA has a crRNA sequence having at least 95% identity to a sequence selected from SEQ ID NOs: 1281-1305. In some embodiments, the at least one guide RNA has a crRNA sequence selected from SEQ ID NOs: 1281-1305. In some embodiments, the joint disease or condition is arthritis, e.g., osteoarthritis. In some embodiments, the administering includes intra-articular injection of the pharmaceutical composition into the joint of the subject.

[0364] In some embodiments, the present disclosure provides a pharmaceutical composition for the treatment or prevention of a joint disease or condition, the composition including a therapeutically effective amount of one or more nucleic acids encoding a Clustered Regularly Interspaced Short Palindromic Repeats (CRISPR) gene-editing system. The system includes a CRISPR Associated Protein 9 (Cas9) protein, and at least one guide RNA targeting an GPX2 gene, wherein the target sequence is adjacent to a protospacer adjacent motif (PAM) sequence for the Cas9 protein. In some embodiments, the at least one guide RNA includes a crRNA sequence that is complementary to a target sequence in any one of exons of the GPX2 gene. In some embodiments, the at least one guide RNA includes a crRNA sequence that is complementary to a target sequence in one of exons disclosed herein of the GPX2 gene. In some embodiments, the at least one guide RNA has a crRNA sequence having at least 75% identity to a sequence selected from SEQ ID NOs: 1306-1330. In some embodiments, the at least one guide RNA has a crRNA sequence having at least 80% identity to a sequence selected from SEQ ID NOs: 1306-1330. In some embodiments, the at least one guide RNA has a crRNA sequence having at least 85% identity to a sequence selected from SEQ ID NOs: 1306-1330. In some embodiments, the at least one guide RNA has a crRNA sequence having at least 90% identity to a sequence selected from SEQ ID NOs: 1306-1330. In some embodiments, the at least one guide RNA has a crRNA sequence having at least 95% identity to a sequence selected from SEQ ID NOs: 1306-1330. In some embodiments, the at least one guide RNA has a crRNA sequence selected from SEQ ID NOs: 1306-1330.

[0365] In some embodiments, the present disclosure provides method for the treatment or prevention of a joint disease or condition in a subject in need thereof. The method includes administering, to a joint of the subject, a pharmaceutical composition including a pharmaceutically effective amount of a composition having one or more nucleic acids encoding a Clustered Regularly Interspaced Short Palindromic Repeats (CRISPR) gene-editing system. The system includes a CRISPR Associated Protein 9 (Cas9) protein, and at least one guide RNA targeting an GPX2 gene, wherein the target sequence is adjacent to a protospacer adjacent motif (PAM) sequence for the Cas9 protein. In some embodiments, the at least one guide RNA includes a crRNA sequence that is complementary to a target sequence in any one of exons of the GPX2 gene. In some embodiments, the at least one guide RNA includes a crRNA sequence that is complementary to a target sequence in one of exons disclosed herein of the GPX2 gene. In some embodiments, the at least one guide RNA has a crRNA sequence having at least 75% identity to a sequence selected from SEQ ID NOs: 1306-1330. In some embodiments, the at least one guide RNA has a crRNA sequence having at least 80% identity to a sequence selected from SEQ ID NOs: 1306-1330. In some embodiments, the at least one guide RNA has a crRNA sequence having at least 85% identity to a sequence selected from SEQ ID NOs: 1306-1330. In some embodiments, the at least one guide RNA has a crRNA sequence having at least 90% identity to a sequence selected from SEQ ID NOs: 1306-1330. In some embodiments, the at least one guide RNA has a crRNA sequence having at least 95% identity to a sequence selected from SEQ ID NOs: 1306-1330. In some embodiments, the at least one guide RNA has a crRNA sequence selected from SEQ ID NOs: 1306-1330. In some embodiments, the joint disease or condition is arthritis, e.g., osteoarthritis. In some embodiments, the administering includes intra-articular injection of the pharmaceutical composition into the joint of the subject.

[0366] In some embodiments, the present disclosure provides a pharmaceutical composition for the treatment or prevention of a joint disease or condition, the composition including a therapeutically effective amount of one or more nucleic acids encoding a Clustered Regularly Interspaced Short Palindromic Repeats (CRISPR) gene-editing system. The system includes a CRISPR Associated Protein 9 (Cas9) protein, and at least one guide RNA targeting an GPX3 gene, wherein the target sequence is adjacent to a protospacer adjacent motif (PAM) sequence for the Cas9 protein. In some embodiments, the at least one guide RNA includes a crRNA sequence that is complementary to a target sequence in any one of exons of the GPX3 gene. In some embodiments, the at least one guide RNA includes a crRNA sequence that is complementary to a target sequence in one of exons disclosed herein of the GPX3 gene. In some embodiments, the at least one guide RNA has a crRNA sequence having at least 75% identity to a sequence selected from SEQ ID NOs: 1331-1355. In some embodiments, the at least one guide RNA has a crRNA sequence having at least 80% identity to a sequence selected from SEQ ID NOs: 1331-1355. In some embodiments, the at least one guide RNA has a crRNA sequence having at least 85% identity to a sequence selected from SEQ ID NOs: 1331-1355. In some embodiments, the at least one guide RNA has a crRNA sequence having at least 90% identity to a sequence selected from SEQ ID NOs: 1331-1355. In some embodiments, the at least one guide RNA has a crRNA sequence having at least 95% identity to a sequence selected from SEQ ID NOs: 1331-1355. In some embodiments, the at least one guide RNA has a crRNA sequence selected from SEQ ID NOs: 1331-1355.

[0367] In some embodiments, the present disclosure provides method for the treatment or prevention of a joint disease or condition in a subject in need thereof. The method includes administering, to a joint of the subject, a pharmaceutical composition including a pharmaceutically effective amount of a composition having one or more nucleic acids encoding a Clustered Regularly Interspaced Short Palindromic Repeats (CRISPR) gene-editing system. The system includes a CRISPR Associated Protein 9 (Cas9) protein, and at least one guide RNA targeting an GPX3 gene, wherein the target sequence is adjacent to a protospacer adjacent motif (PAM) sequence for the Cas9 protein. In some embodiments, the at least one guide RNA includes a crRNA sequence that is complementary to a target sequence in any one of exons of the GPX3 gene. In some embodiments, the at least one guide RNA includes a crRNA sequence that is complementary to a target sequence in one of exons disclosed herein of the GPX3 gene. In some embodiments, the at least one guide RNA has a crRNA sequence having at least 75% identity to a sequence selected from SEQ ID NOs: 1331-1355. In some embodiments, the at least one guide RNA has a crRNA sequence having at least 80% identity to a sequence selected from SEQ ID NOs: 1331-1355. In some embodiments, the at least one guide RNA has a crRNA sequence having at least 85% identity to a sequence selected from SEQ ID NOs: 1331-1355. In some embodiments, the at least one guide RNA has a crRNA sequence having at least 90% identity to a sequence selected from SEQ ID NOs: 1331-1355. In some embodiments, the at least one guide RNA has a crRNA sequence having at least 95% identity to a sequence selected from SEQ ID NOs: 1331-1355. In some embodiments, the at least one guide RNA has a crRNA sequence selected from SEQ ID NOs: 1331-1355. In some embodiments, the joint disease or condition is arthritis, e.g., osteoarthritis. In some embodiments, the administering includes intra-articular injection of the pharmaceutical composition into the joint of the subject.

[0368] In some embodiments, the present disclosure provides a pharmaceutical composition for the treatment or prevention of a joint disease or condition, the composition including a therapeutically effective amount of one or more nucleic acids encoding a Clustered Regularly Interspaced Short Palindromic Repeats (CRISPR) gene-editing system. The system includes a CRISPR Associated Protein 9 (Cas9) protein, and at least one guide RNA targeting an GPX4 gene, wherein the target sequence is adjacent to a protospacer adjacent motif (PAM) sequence for the Cas9 protein. In some embodiments, the at least one guide RNA includes a crRNA sequence that is complementary to a target sequence in any one of exons of the GPX4 gene. In some embodiments, the at least one guide RNA includes a crRNA sequence that is complementary to a target sequence in one of exons disclosed herein of the GPX4 gene. In some embodiments, the at least one guide RNA has a crRNA sequence having at least 75% identity to a sequence selected from SEQ ID NOs: 1356-1380. In some embodiments, the at least one guide RNA has a crRNA sequence having at least 80% identity to a sequence selected from SEQ ID NOs: 1356-1380. In some embodiments, the at least one guide RNA has a crRNA sequence having at least 85% identity to a sequence selected from SEQ ID NOs: 1356-1380. In some embodiments, the at least one guide RNA has a crRNA sequence having at least 90% identity to a sequence selected from SEQ ID NOs: 1356-1380. In some embodiments, the at least one guide RNA has a crRNA sequence having at least 95% identity to a sequence selected from SEQ ID NOs: 1356-1380. In some embodiments, the at least one guide RNA has a crRNA sequence selected from SEQ ID NOs: 1356-1380.

[0369] In some embodiments, the present disclosure provides method for the treatment or prevention of a joint disease or condition in a subject in need thereof. The method includes administering, to a joint of the subject, a pharmaceutical composition including a pharmaceutically effective amount of a composition having one or more nucleic acids encoding a Clustered Regularly Interspaced Short Palindromic Repeats (CRISPR) gene-editing system. The system includes a CRISPR Associated Protein 9 (Cas9) protein, and at least one guide RNA targeting an GPX4 gene, wherein the target sequence is adjacent to a protospacer adjacent motif (PAM) sequence for the Cas9 protein. In some embodiments, the at least one guide RNA includes a crRNA sequence that is complementary to a target sequence in any one of exons of the GPX4 gene. In some embodiments, the at least one guide RNA includes a crRNA sequence that is complementary to a target sequence in one of exons disclosed herein of the GPX4 gene. In some embodiments, the at least one guide RNA has a crRNA sequence having at least 75% identity to a sequence selected from SEQ ID NOs: 1356-1380. In some embodiments, the at least one guide RNA has a crRNA sequence having at least 80% identity to a sequence selected from SEQ ID NOs: 1356-1380. In some embodiments, the at least one guide RNA has a crRNA sequence having at least 85% identity to a sequence selected from SEQ ID NOs: 1356-1380. In some embodiments, the at least one guide RNA has a crRNA sequence having at least 90% identity to a sequence selected from SEQ ID NOs: 1356-1380. In some embodiments, the at least one guide RNA has a crRNA sequence having at least 95% identity to a sequence selected from SEQ ID NOs: 1356-1380. In some embodiments, the at least one guide RNA has a crRNA sequence selected from SEQ ID NOs: 1356-1380. In some embodiments, the joint disease or condition is arthritis, e.g., osteoarthritis. In some embodiments, the administering includes intra-articular injection of the pharmaceutical composition into the joint of the subject.

[0370] In some embodiments, the present disclosure provides a pharmaceutical composition for the treatment or prevention of a joint disease or condition, the composition including a therapeutically effective amount of one or more nucleic acids encoding a Clustered Regularly Interspaced Short Palindromic Repeats (CRISPR) gene-editing system. The system includes a CRISPR Associated Protein 9 (Cas9) protein, and at least one guide RNA targeting an GPX5 gene, wherein the target sequence is adjacent to a protospacer adjacent motif (PAM) sequence for the Cas9 protein. In some embodiments, the at least one guide RNA includes a crRNA sequence that is complementary to a target sequence in any one of exons of the GPX5 gene. In some embodiments, the at least one guide RNA includes a crRNA sequence that is complementary to a target sequence in one of exons disclosed herein of the GPX5 gene. In some embodiments, the at least one guide RNA has a crRNA sequence having at least 75% identity to a sequence selected from SEQ ID NOs: 1381-1405. In some embodiments, the at least one guide RNA has a crRNA sequence having at least 80% identity to a sequence selected from SEQ ID NOs: 1381-1405. In some embodiments, the at least one guide RNA has a crRNA sequence having at least 85% identity to a sequence selected from SEQ ID NOs: 1381-1405. In some embodiments, the at least one guide RNA has a crRNA sequence having at least 90% identity to a sequence selected from SEQ ID NOs: 1381-1405. In some embodiments, the at least one guide RNA has a crRNA sequence having at least 95% identity to a sequence selected from SEQ ID NOs: 1381-1405. In some embodiments, the at least one guide RNA has a crRNA sequence selected from SEQ ID NOs: 1381-1405.

[0371] In some embodiments, the present disclosure provides method for the treatment or prevention of a joint disease or condition in a subject in need thereof. The method includes administering, to a joint of the subject, a pharmaceutical composition including a pharmaceutically effective amount of a composition having one or more nucleic acids encoding a Clustered Regularly Interspaced Short Palindromic Repeats (CRISPR) gene-editing system. The system includes a CRISPR Associated Protein 9 (Cas9) protein, and at least one guide RNA targeting an GPX5 gene, wherein the target sequence is adjacent to a protospacer adjacent motif (PAM) sequence for the Cas9 protein. In some embodiments, the at least one guide RNA includes a crRNA sequence that is complementary to a target sequence in any one of exons of the GPX5 gene. In some embodiments, the at least one guide RNA includes a crRNA sequence that is complementary to a target sequence in one of exons disclosed herein of the GPX5 gene. In some embodiments, the at least one guide RNA has a crRNA sequence having at least 75% identity to a sequence selected from SEQ ID NOs: 1381-1405. In some embodiments, the at least one guide RNA has a crRNA sequence having at least 80% identity to a sequence selected from SEQ ID NOs: 1381-1405. In some embodiments, the at least one guide RNA has a crRNA sequence having at least 85% identity to a sequence selected from SEQ ID NOs: 1381-1405. In some embodiments, the at least one guide RNA has a crRNA sequence having at least 90% identity to a sequence selected from SEQ ID NOs: 1381-1405. In some embodiments, the at least one guide RNA has a crRNA sequence having at least 95% identity to a sequence selected from SEQ ID NOs: 1381-1405. In some embodiments, the at least one guide RNA has a crRNA sequence selected from SEQ ID NOs: 1381-1405. In some embodiments, the joint disease or condition is arthritis, e.g., osteoarthritis. In some embodiments, the administering includes intra-articular injection of the pharmaceutical composition into the joint of the subject.

[0372] In some embodiments, the present disclosure provides a pharmaceutical composition for the treatment or prevention of a joint disease or condition, the composition including a therapeutically effective amount of one or more nucleic acids encoding a Clustered Regularly Interspaced Short Palindromic Repeats (CRISPR) gene-editing system. The system includes a CRISPR Associated Protein 9 (Cas9) protein, and at least one guide RNA targeting an GPX6 gene, wherein the target sequence is adjacent to a protospacer adjacent motif (PAM) sequence for the Cas9 protein. In some embodiments, the at least one guide RNA includes a crRNA sequence that is complementary to a target sequence in any one of exons of the GPX6 gene. In some embodiments, the at least one guide RNA includes a crRNA sequence that is complementary to a target sequence in one of exons disclosed herein of the GPX6 gene. In some embodiments, the at least one guide RNA has a crRNA sequence having at least 75% identity to a sequence selected from SEQ ID NOs: 1406-1430. In some embodiments, the at least one guide RNA has a crRNA sequence having at least 80% identity to a sequence selected from SEQ ID NOs: 1406-1430. In some embodiments, the at least one guide RNA has a crRNA sequence having at least 85% identity to a sequence selected from SEQ ID NOs: 1406-1430. In some embodiments, the at least one guide RNA has a crRNA sequence having at least 90% identity to a sequence selected from SEQ ID NOs: 1406-1430. In some embodiments, the at least one guide RNA has a crRNA sequence having at least 95% identity to a sequence selected from SEQ ID NOs: 1406-1430. In some embodiments, the at least one guide RNA has a crRNA sequence selected from SEQ ID NOs: 1406-1430.

[0373] In some embodiments, the present disclosure provides method for the treatment or prevention of a joint disease or condition in a subject in need thereof. The method includes administering, to a joint of the subject, a pharmaceutical composition including a pharmaceutically effective amount of a composition having one or more nucleic acids encoding a Clustered Regularly Interspaced Short Palindromic Repeats (CRISPR) gene-editing system. The system includes a CRISPR Associated Protein 9 (Cas9) protein, and at least one guide RNA targeting an GPX6 gene, wherein the target sequence is adjacent to a protospacer adjacent motif (PAM) sequence for the Cas9 protein. In some embodiments, the at least one guide RNA includes a crRNA sequence that is complementary to a target sequence in any one of exons of the GPX6 gene. In some embodiments, the at least one guide RNA includes a crRNA sequence that is complementary to a target sequence in one of exons disclosed herein of the GPX6 gene. In some embodiments, the at least one guide RNA has a crRNA sequence having at least 75% identity to a sequence selected from SEQ ID NOs: 1406-1430. In some embodiments, the at least one guide RNA has a crRNA sequence having at least 80% identity to a sequence selected from SEQ ID NOs: 1406-1430. In some embodiments, the at least one guide RNA has a crRNA sequence having at least 85% identity to a sequence selected from SEQ ID NOs: 1406-1430. In some embodiments, the at least one guide RNA has a crRNA sequence having at least 90% identity to a sequence selected from SEQ ID NOs: 1406-1430. In some embodiments, the at least one guide RNA has a crRNA sequence having at least 95% identity to a sequence selected from SEQ ID NOs: 1406-1430. In some embodiments, the at least one guide RNA has a crRNA sequence selected from SEQ ID NOs: 1406-1430. In some embodiments, the joint disease or condition is arthritis, e.g., osteoarthritis. In some embodiments, the administering includes intra-articular injection of the pharmaceutical composition into the joint of the subject.

[0374] In some embodiments, the present disclosure provides a pharmaceutical composition for the treatment or prevention of a joint disease or condition, the composition including a therapeutically effective amount of one or more nucleic acids encoding a Clustered Regularly Interspaced Short Palindromic Repeats (CRISPR) gene-editing system. The system includes a CRISPR Associated Protein 9 (Cas9) protein, and at least one guide RNA targeting an GPX7 gene, wherein the target sequence is adjacent to a protospacer adjacent motif (PAM) sequence for the Cas9 protein. In some embodiments, the at least one guide RNA includes a crRNA sequence that is complementary to a target sequence in any one of exons of the GPX7 gene. In some embodiments, the at least one guide RNA includes a crRNA sequence that is complementary to a target sequence in one of exons disclosed herein of the GPX7 gene. In some embodiments, the at least one guide RNA has a crRNA sequence having at least 75% identity to a sequence selected from SEQ ID NOs: 1431-1455. In some embodiments, the at least one guide RNA has a crRNA sequence having at least 80% identity to a sequence selected from SEQ ID NOs: 1431-1455. In some embodiments, the at least one guide RNA has a crRNA sequence having at least 85% identity to a sequence selected from SEQ ID NOs: 1431-1455. In some embodiments, the at least one guide RNA has a crRNA sequence having at least 90% identity to a sequence selected from SEQ ID NOs: 1431-1455. In some embodiments, the at least one guide RNA has a crRNA sequence having at least 95% identity to a sequence selected from SEQ ID NOs: 1431-1455. In some embodiments, the at least one guide RNA has a crRNA sequence selected from SEQ ID NOs: 1431-1455.

[0375] In some embodiments, the present disclosure provides method for the treatment or prevention of a joint disease or condition in a subject in need thereof. The method includes administering, to a joint of the subject, a pharmaceutical composition including a pharmaceutically effective amount of a composition having one or more nucleic acids encoding a Clustered Regularly Interspaced Short Palindromic Repeats (CRISPR) gene-editing system. The system includes a CRISPR Associated Protein 9 (Cas9) protein, and at least one guide RNA targeting an GPX7 gene, wherein the target sequence is adjacent to a protospacer adjacent motif (PAM) sequence for the Cas9 protein. In some embodiments, the at least one guide RNA includes a crRNA sequence that is complementary to a target sequence in any one of exons of the GPX7 gene. In some embodiments, the at least one guide RNA includes a crRNA sequence that is complementary to a target sequence in one of exons disclosed herein of the GPX7 gene. In some embodiments, the at least one guide RNA has a crRNA sequence having at least 75% identity to a sequence selected from SEQ ID NOs: 1431-1455. In some embodiments, the at least one guide RNA has a crRNA sequence having at least 80% identity to a sequence selected from SEQ ID NOs: 1431-1455. In some embodiments, the at least one guide RNA has a crRNA sequence having at least 85% identity to a sequence selected from SEQ ID NOs: 1431-1455. In some embodiments, the at least one guide RNA has a crRNA sequence having at least 90% identity to a sequence selected from SEQ ID NOs: 1431-1455. In some embodiments, the at least one guide RNA has a crRNA sequence having at least 95% identity to a sequence selected from SEQ ID NOs: 1431-1455. In some embodiments, the at least one guide RNA has a crRNA sequence selected from SEQ ID NOs: 1431-1455. In some embodiments, the joint disease or condition is arthritis, e.g., osteoarthritis. In some embodiments, the administering includes intra-articular injection of the pharmaceutical composition into the joint of the subject.

[0376] In some embodiments, the present disclosure provides a pharmaceutical composition for the treatment or prevention of a joint disease or condition, the composition including a therapeutically effective amount of one or more nucleic acids encoding a Clustered Regularly Interspaced Short Palindromic Repeats (CRISPR) gene-editing system. The system includes a CRISPR Associated Protein 9 (Cas9) protein, and at least one guide RNA targeting an GPX8 gene, wherein the target sequence is adjacent to a protospacer adjacent motif (PAM) sequence for the Cas9 protein. In some embodiments, the at least one guide RNA includes a crRNA sequence that is complementary to a target sequence in any one of exons of the GPX8 gene. In some embodiments, the at least one guide RNA includes a crRNA sequence that is complementary to a target sequence in one of exons disclosed herein of the GPX8 gene. In some embodiments, the at least one guide RNA has a crRNA sequence having at least 75% identity to a sequence selected from SEQ ID NOs: 1456-1480. In some embodiments, the at least one guide RNA has a crRNA sequence having at least 80% identity to a sequence selected from SEQ ID NOs: 1456-1480. In some embodiments, the at least one guide RNA has a crRNA sequence having at least 85% identity to a sequence selected from SEQ ID NOs: 1456-1480. In some embodiments, the at least one guide RNA has a crRNA sequence having at least 90% identity to a sequence selected from SEQ ID NOs: 1456-1480. In some embodiments, the at least one guide RNA has a crRNA sequence having at least 95% identity to a sequence selected from SEQ ID NOs: 1456-1480. In some embodiments, the at least one guide RNA has a crRNA sequence selected from SEQ ID NOs: 1456-1480.

[0377] In some embodiments, the present disclosure provides method for the treatment or prevention of a joint disease or condition in a subject in need thereof. The method includes administering, to a joint of the subject, a pharmaceutical composition including a pharmaceutically effective amount of a composition having one or more nucleic acids encoding a Clustered Regularly Interspaced Short Palindromic Repeats (CRISPR) gene-editing system. The system includes a CRISPR Associated Protein 9 (Cas9) protein, and at least one guide RNA targeting an GPX8 gene, wherein the target sequence is adjacent to a protospacer adjacent motif (PAM) sequence for the Cas9 protein. In some embodiments, the at least one guide RNA includes a crRNA sequence that is complementary to a target sequence in any one of exons of the GPX8 gene. In some embodiments, the at least one guide RNA includes a crRNA sequence that is complementary to a target sequence in one of exons disclosed herein of the GPX8 gene. In some embodiments, the at least one guide RNA has a crRNA sequence having at least 75% identity to a sequence selected from SEQ ID NOs: 1456-1480. In some embodiments, the at least one guide RNA has a crRNA sequence having at least 80% identity to a sequence selected from SEQ ID NOs: 1456-1480. In some embodiments, the at least one guide RNA has a crRNA sequence having at least 85% identity to a sequence selected from SEQ ID NOs: 1456-1480. In some embodiments, the at least one guide RNA has a crRNA sequence having at least 90% identity to a sequence selected from SEQ ID NOs: 1456-1480. In some embodiments, the at least one guide RNA has a crRNA sequence having at least 95% identity to a sequence selected from SEQ ID NOs: 1456-1480. In some embodiments, the at least one guide RNA has a crRNA sequence selected from SEQ ID NOs: 1456-1480. In some embodiments, the joint disease or condition is arthritis, e.g., osteoarthritis. In some embodiments, the administering includes intra-articular injection of the pharmaceutical composition into the joint of the subject.

[0378] In some embodiments, the present disclosure provides a pharmaceutical composition for the treatment or prevention of a joint disease or condition, the composition including a therapeutically effective amount of one or more nucleic acids encoding a Clustered Regularly Interspaced Short Palindromic Repeats (CRISPR) gene-editing system. The system includes a CRISPR Associated Protein 9 (Cas9) protein, and at least one guide RNA targeting an GSR gene, wherein the target sequence is adjacent to a protospacer adjacent motif (PAM) sequence for the Cas9 protein. In some embodiments, the at least one guide RNA includes a crRNA sequence that is complementary to a target sequence in any one of exons of the GSR gene. In some embodiments, the at least one guide RNA includes a crRNA sequence that is complementary to a target sequence in one of exons disclosed herein of the GSR gene. In some embodiments, the at least one guide RNA has a crRNA sequence having at least 75% identity to a sequence selected from SEQ ID NOs: 1481-1505. In some embodiments, the at least one guide RNA has a crRNA sequence having at least 80% identity to a sequence selected from SEQ ID NOs: 1481-1505. In some embodiments, the at least one guide RNA has a crRNA sequence having at least 85% identity to a sequence selected from SEQ ID NOs: 1481-1505. In some embodiments, the at least one guide RNA has a crRNA sequence having at least 90% identity to a sequence selected from SEQ ID NOs: 1481-1505. In some embodiments, the at least one guide RNA has a crRNA sequence having at least 95% identity to a sequence selected from SEQ ID NOs: 1481-1505. In some embodiments, the at least one guide RNA has a crRNA sequence selected from SEQ ID NOs: 1481-1505.

[0379] In some embodiments, the present disclosure provides method for the treatment or prevention of a joint disease or condition in a subject in need thereof. The method includes administering, to a joint of the subject, a pharmaceutical composition including a pharmaceutically effective amount of a composition having one or more nucleic acids encoding a Clustered Regularly Interspaced Short Palindromic Repeats (CRISPR) gene-editing system. The system includes a CRISPR Associated Protein 9 (Cas9) protein, and at least one guide RNA targeting an GSR gene, wherein the target sequence is adjacent to a protospacer adjacent motif (PAM) sequence for the Cas9 protein. In some embodiments, the at least one guide RNA includes a crRNA sequence that is complementary to a target sequence in any one of exons of the GSR gene. In some embodiments, the at least one guide RNA includes a crRNA sequence that is complementary to a target sequence in one of exons disclosed herein of the GSR gene. In some embodiments, the at least one guide RNA has a crRNA sequence having at least 75% identity to a sequence selected from SEQ ID NOs: 1481-1505. In some embodiments, the at least one guide RNA has a crRNA sequence having at least 80% identity to a sequence selected from SEQ ID NOs: 1481-1505. In some embodiments, the at least one guide RNA has a crRNA sequence having at least 85% identity to a sequence selected from SEQ ID NOs: 1481-1505. In some embodiments, the at least one guide RNA has a crRNA sequence having at least 90% identity to a sequence selected from SEQ ID NOs: 1481-1505. In some embodiments, the at least one guide RNA has a crRNA sequence having at least 95% identity to a sequence selected from SEQ ID NOs: 1481-1505. In some embodiments, the at least one guide RNA has a crRNA sequence selected from SEQ ID NOs: 1481-1505. In some embodiments, the joint disease or condition is arthritis, e.g., osteoarthritis. In some embodiments, the administering includes intra-articular injection of the pharmaceutical composition into the joint of the subject.

[0380] In some embodiments, the present disclosure provides a pharmaceutical composition for the treatment or prevention of a joint disease or condition, the composition including a therapeutically effective amount of one or more nucleic acids encoding a Clustered Regularly Interspaced Short Palindromic Repeats (CRISPR) gene-editing system. The system includes a CRISPR Associated Protein 9 (Cas9) protein, and at least one guide RNA targeting an GPD1 gene, wherein the target sequence is adjacent to a protospacer adjacent motif (PAM) sequence for the Cas9 protein. In some embodiments, the at least one guide RNA includes a crRNA sequence that is complementary to a target sequence in any one of exons of the GPD1 gene. In some embodiments, the at least one guide RNA includes a crRNA sequence that is complementary to a target sequence in one of exons disclosed herein of the GPD1 gene. In some embodiments, the at least one guide RNA has a crRNA sequence having at least 75% identity to a sequence selected from SEQ ID NOs: 1506-1530. In some embodiments, the at least one guide RNA has a crRNA sequence having at least 80% identity to a sequence selected from SEQ ID NOs: 1506-1530. In some embodiments, the at least one guide RNA has a crRNA sequence having at least 85% identity to a sequence selected from SEQ ID NOs: 1506-1530. In some embodiments, the at least one guide RNA has a crRNA sequence having at least 90% identity to a sequence selected from SEQ ID NOs: 1506-1530. In some embodiments, the at least one guide RNA has a crRNA sequence having at least 95% identity to a sequence selected from SEQ ID NOs: 1506-1530. In some embodiments, the at least one guide RNA has a crRNA sequence selected from SEQ ID NOs: 1506-1530.

[0381] In some embodiments, the present disclosure provides method for the treatment or prevention of a joint disease or condition in a subject in need thereof. The method includes administering, to a joint of the subject, a pharmaceutical composition including a pharmaceutically effective amount of a composition having one or more nucleic acids encoding a Clustered Regularly Interspaced Short Palindromic Repeats (CRISPR) gene-editing system. The system includes a CRISPR Associated Protein 9 (Cas9) protein, and at least one guide RNA targeting an GPD1 gene, wherein the target sequence is adjacent to a protospacer adjacent motif (PAM) sequence for the Cas9 protein. In some embodiments, the at least one guide RNA includes a crRNA sequence that is complementary to a target sequence in any one of exons of the GPD1 gene. In some embodiments, the at least one guide RNA includes a crRNA sequence that is complementary to a target sequence in one of exons disclosed herein of the GPD1 gene. In some embodiments, the at least one guide RNA has a crRNA sequence having at least 75% identity to a sequence selected from SEQ ID NOs: 1506-1530. In some embodiments, the at least one guide RNA has a crRNA sequence having at least 80% identity to a sequence selected from SEQ ID NOs: 1506-1530. In some embodiments, the at least one guide RNA has a crRNA sequence having at least 85% identity to a sequence selected from SEQ ID NOs: 1506-1530. In some embodiments, the at least one guide RNA has a crRNA sequence having at least 90% identity to a sequence selected from SEQ ID NOs: 1506-1530. In some embodiments, the at least one guide RNA has a crRNA sequence having at least 95% identity to a sequence selected from SEQ ID NOs: 1506-1530. In some embodiments, the at least one guide RNA has a crRNA sequence selected from SEQ ID NOs: 1506-1530. In some embodiments, the joint disease or condition is arthritis, e.g., osteoarthritis. In some embodiments, the administering includes intra-articular injection of the pharmaceutical composition into the joint of the subject.

[0382] In some embodiments, the present disclosure provides a pharmaceutical composition for the treatment or prevention of a joint disease or condition, the composition including a therapeutically effective amount of one or more nucleic acids encoding a Clustered Regularly Interspaced Short Palindromic Repeats (CRISPR) gene-editing system. The system includes a CRISPR Associated Protein 9 (Cas9) protein, and at least one guide RNA targeting an GPD2 gene, wherein the target sequence is adjacent to a protospacer adjacent motif (PAM) sequence for the Cas9 protein. In some embodiments, the at least one guide RNA includes a crRNA sequence that is complementary to a target sequence in any one of exons of the GPD2 gene. In some embodiments, the at least one guide RNA includes a crRNA sequence that is complementary to a target sequence in one of exons disclosed herein of the GPD2 gene. In some embodiments, the at least one guide RNA has a crRNA sequence having at least 75% identity to a sequence selected from SEQ ID NOs: 1531-1555. In some embodiments, the at least one guide RNA has a crRNA sequence having at least 80% identity to a sequence selected from SEQ ID NOs: 1531-1555. In some embodiments, the at least one guide RNA has a crRNA sequence having at least 85% identity to a sequence selected from SEQ ID NOs: 1531-1555. In some embodiments, the at least one guide RNA has a crRNA sequence having at least 90% identity to a sequence selected from SEQ ID NOs: 1531-1555. In some embodiments, the at least one guide RNA has a crRNA sequence having at least 95% identity to a sequence selected from SEQ ID NOs: 1531-1555. In some embodiments, the at least one guide RNA has a crRNA sequence selected from SEQ ID NOs: 1531-1555.

[0383] In some embodiments, the present disclosure provides method for the treatment or prevention of a joint disease or condition in a subject in need thereof. The method includes administering, to a joint of the subject, a pharmaceutical composition including a pharmaceutically effective amount of a composition having one or more nucleic acids encoding a Clustered Regularly Interspaced Short Palindromic Repeats (CRISPR) gene-editing system. The system includes a CRISPR Associated Protein 9 (Cas9) protein, and at least one guide RNA targeting an GPD2 gene, wherein the target sequence is adjacent to a protospacer adjacent motif (PAM) sequence for the Cas9 protein. In some embodiments, the at least one guide RNA includes a crRNA sequence that is complementary to a target sequence in any one of exons of the GPD2 gene. In some embodiments, the at least one guide RNA includes a crRNA sequence that is complementary to a target sequence in one of exons disclosed herein of the GPD2 gene. In some embodiments, the at least one guide RNA has a crRNA sequence having at least 75% identity to a sequence selected from SEQ ID NOs: 1531-1555. In some embodiments, the at least one guide RNA has a crRNA sequence having at least 80% identity to a sequence selected from SEQ ID NOs: 1531-1555. In some embodiments, the at least one guide RNA has a crRNA sequence having at least 85% identity to a sequence selected from SEQ ID NOs: 1531-1555. In some embodiments, the at least one guide RNA has a crRNA sequence having at least 90% identity to a sequence selected from SEQ ID NOs: 1531-1555. In some embodiments, the at least one guide RNA has a crRNA sequence having at least 95% identity to a sequence selected from SEQ ID NOs: 1531-1555. In some embodiments, the at least one guide RNA has a crRNA sequence selected from SEQ ID NOs: 1531-1555. In some embodiments, the joint disease or condition is arthritis, e.g., osteoarthritis. In some embodiments, the administering includes intra-articular injection of the pharmaceutical composition into the joint of the subject.

[0384] In some embodiments, the present disclosure provides a pharmaceutical composition for the treatment or prevention of a joint disease or condition, the composition including a therapeutically effective amount of one or more nucleic acids encoding a Clustered Regularly Interspaced Short Palindromic Repeats (CRISPR) gene-editing system. The system includes a CRISPR Associated Protein 9 (Cas9) protein, and at least one guide RNA targeting an GADD45A gene, wherein the target sequence is adjacent to a protospacer adjacent motif (PAM) sequence for the Cas9 protein. In some embodiments, the at least one guide RNA includes a crRNA sequence that is complementary to a target sequence in any one of exons of the GADD45A gene. In some embodiments, the at least one guide RNA includes a crRNA sequence that is complementary to a target sequence in one of exons disclosed herein of the GADD45A gene. In some embodiments, the at least one guide RNA has a crRNA sequence having at least 75% identity to a sequence selected from SEQ ID NOs: 1556-1580. In some embodiments, the at least one guide RNA has a crRNA sequence having at least 80% identity to a sequence selected from SEQ ID NOs: 1556-1580. In some embodiments, the at least one guide RNA has a crRNA sequence having at least 85% identity to a sequence selected from SEQ ID NOs: 1556-1580. In some embodiments, the at least one guide RNA has a crRNA sequence having at least 90% identity to a sequence selected from SEQ ID NOs: 1556-1580. In some embodiments, the at least one guide RNA has a crRNA sequence having at least 95% identity to a sequence selected from SEQ ID NOs: 1556-1580. In some embodiments, the at least one guide RNA has a crRNA sequence selected from SEQ ID NOs: 1556-1580.

[0385] In some embodiments, the present disclosure provides method for the treatment or prevention of a joint disease or condition in a subject in need thereof. The method includes administering, to a joint of the subject, a pharmaceutical composition including a pharmaceutically effective amount of a composition having one or more nucleic acids encoding a Clustered Regularly Interspaced Short Palindromic Repeats (CRISPR) gene-editing system. The system includes a CRISPR Associated Protein 9 (Cas9) protein, and at least one guide RNA targeting an GADD45A gene, wherein the target sequence is adjacent to a protospacer adjacent motif (PAM) sequence for the Cas9 protein. In some embodiments, the at least one guide RNA includes a crRNA sequence that is complementary to a target sequence in any one of exons of the GADD45A gene. In some embodiments, the at least one guide RNA includes a crRNA sequence that is complementary to a target sequence in one of exons disclosed herein of the GADD45A gene. In some embodiments, the at least one guide RNA has a crRNA sequence having at least 75% identity to a sequence selected from SEQ ID NOs: 1556-1580. In some embodiments, the at least one guide RNA has a crRNA sequence having at least 80% identity to a sequence selected from SEQ ID NOs: 1556-1580. In some embodiments, the at least one guide RNA has a crRNA sequence having at least 85% identity to a sequence selected from SEQ ID NOs: 1556-1580. In some embodiments, the at least one guide RNA has a crRNA sequence having at least 90% identity to a sequence selected from SEQ ID NOs: 1556-1580. In some embodiments, the at least one guide RNA has a crRNA sequence having at least 95% identity to a sequence selected from SEQ ID NOs: 1556-1580. In some embodiments, the at least one guide RNA has a crRNA sequence selected from SEQ ID NOs: 1556-1580. In some embodiments, the joint disease or condition is arthritis, e.g., osteoarthritis. In some embodiments, the administering includes intra-articular injection of the pharmaceutical composition into the joint of the subject.

[0386] In some embodiments, the present disclosure provides a pharmaceutical composition for the treatment or prevention of a joint disease or condition, the composition including a therapeutically effective amount of one or more nucleic acids encoding a Clustered Regularly Interspaced Short Palindromic Repeats (CRISPR) gene-editing system. The system includes a CRISPR Associated Protein 9 (Cas9) protein, and at least one guide RNA targeting an GADD45B gene, wherein the target sequence is adjacent to a protospacer adjacent motif (PAM) sequence for the Cas9 protein. In some embodiments, the at least one guide RNA includes a crRNA sequence that is complementary to a target sequence in any one of exons of the GADD45B gene. In some embodiments, the at least one guide RNA includes a crRNA sequence that is complementary to a target sequence in one of exons disclosed herein of the GADD45B gene. In some embodiments, the at least one guide RNA has a crRNA sequence having at least 75% identity to a sequence selected from SEQ ID NOs: 1581-1605. In some embodiments, the at least one guide RNA has a crRNA sequence having at least 80% identity to a sequence selected from SEQ ID NOs: 1581-1605. In some embodiments, the at least one guide RNA has a crRNA sequence having at least 85% identity to a sequence selected from SEQ ID NOs: 1581-1605. In some embodiments, the at least one guide RNA has a crRNA sequence having at least 90% identity to a sequence selected from SEQ ID NOs: 1581-1605. In some embodiments, the at least one guide RNA has a crRNA sequence having at least 95% identity to a sequence selected from SEQ ID NOs: 1581-1605. In some embodiments, the at least one guide RNA has a crRNA sequence selected from SEQ ID NOs: 1581-1605.

[0387] In some embodiments, the present disclosure provides method for the treatment or prevention of a joint disease or condition in a subject in need thereof. The method includes administering, to a joint of the subject, a pharmaceutical composition including a pharmaceutically effective amount of a composition having one or more nucleic acids encoding a Clustered Regularly Interspaced Short Palindromic Repeats (CRISPR) gene-editing system. The system includes a CRISPR Associated Protein 9 (Cas9) protein, and at least one guide RNA targeting an GADD45B gene, wherein the target sequence is adjacent to a protospacer adjacent motif (PAM) sequence for the Cas9 protein. In some embodiments, the at least one guide RNA includes a crRNA sequence that is complementary to a target sequence in any one of exons of the GADD45B gene. In some embodiments, the at least one guide RNA includes a crRNA sequence that is complementary to a target sequence in one of exons disclosed herein of the GADD45B gene. In some embodiments, the at least one guide RNA has a crRNA sequence having at least 75% identity to a sequence selected from SEQ ID NOs: 1581-1605. In some embodiments, the at least one guide RNA has a crRNA sequence having at least 80% identity to a sequence selected from SEQ ID NOs: 1581-1605. In some embodiments, the at least one guide RNA has a crRNA sequence having at least 85% identity to a sequence selected from SEQ ID NOs: 1581-1605. In some embodiments, the at least one guide RNA has a crRNA sequence having at least 90% identity to a sequence selected from SEQ ID NOs: 1581-1605. In some embodiments, the at least one guide RNA has a crRNA sequence having at least 95% identity to a sequence selected from SEQ ID NOs: 1581-1605. In some embodiments, the at least one guide RNA has a crRNA sequence selected from SEQ ID NOs: 1581-1605. In some embodiments, the joint disease or condition is arthritis, e.g., osteoarthritis. In some embodiments, the administering includes intra-articular injection of the pharmaceutical composition into the joint of the subject.

[0388] In some embodiments, the present disclosure provides a pharmaceutical composition for the treatment or prevention of a joint disease or condition, the composition including a therapeutically effective amount of one or more nucleic acids encoding a Clustered Regularly Interspaced Short Palindromic Repeats (CRISPR) gene-editing system. The system includes a CRISPR Associated Protein 9 (Cas9) protein, and at least one guide RNA targeting an GADD45G gene, wherein the target sequence is adjacent to a protospacer adjacent motif (PAM) sequence for the Cas9 protein. In some embodiments, the at least one guide RNA includes a crRNA sequence that is complementary to a target sequence in any one of exons of the GADD45G gene. In some embodiments, the at least one guide RNA includes a crRNA sequence that is complementary to a target sequence in one of exons disclosed herein of the GADD45G gene. In some embodiments, the at least one guide RNA has a crRNA sequence having at least 75% identity to a sequence selected from SEQ ID NOs: 1606-1630. In some embodiments, the at least one guide RNA has a crRNA sequence having at least 80% identity to a sequence selected from SEQ ID NOs: 1606-1630. In some embodiments, the at least one guide RNA has a crRNA sequence having at least 85% identity to a sequence selected from SEQ ID NOs: 1606-1630. In some embodiments, the at least one guide RNA has a crRNA sequence having at least 90% identity to a sequence selected from SEQ ID NOs: 1606-1630. In some embodiments, the at least one guide RNA has a crRNA sequence having at least 95% identity to a sequence selected from SEQ ID NOs: 1606-1630. In some embodiments, the at least one guide RNA has a crRNA sequence selected from SEQ ID NOs: 1606-1630.

[0389] In some embodiments, the present disclosure provides method for the treatment or prevention of a joint disease or condition in a subject in need thereof. The method includes administering, to a joint of the subject, a pharmaceutical composition including a pharmaceutically effective amount of a composition having one or more nucleic acids encoding a Clustered Regularly Interspaced Short Palindromic Repeats (CRISPR) gene-editing system. The system includes a CRISPR Associated Protein 9 (Cas9) protein, and at least one guide RNA targeting an GADD45G gene, wherein the target sequence is adjacent to a protospacer adjacent motif (PAM) sequence for the Cas9 protein. In some embodiments, the at least one guide RNA includes a crRNA sequence that is complementary to a target sequence in any one of exons of the GADD45G gene. In some embodiments, the at least one guide RNA includes a crRNA sequence that is complementary to a target sequence in one of exons disclosed herein of the GADD45G gene. In some embodiments, the at least one guide RNA has a crRNA sequence having at least 75% identity to a sequence selected from SEQ ID NOs: 1606-1630. In some embodiments, the at least one guide RNA has a crRNA sequence having at least 80% identity to a sequence selected from SEQ ID NOs: 1606-1630. In some embodiments, the at least one guide RNA has a crRNA sequence having at least 85% identity to a sequence selected from SEQ ID NOs: 1606-1630. In some embodiments, the at least one guide RNA has a crRNA sequence having at least 90% identity to a sequence selected from SEQ ID NOs: 1606-1630. In some embodiments, the at least one guide RNA has a crRNA sequence having at least 95% identity to a sequence selected from SEQ ID NOs: 1606-1630. In some embodiments, the at least one guide RNA has a crRNA sequence selected from SEQ ID NOs: 1606-1630. In some embodiments, the joint disease or condition is arthritis, e.g., osteoarthritis. In some embodiments, the administering includes intra-articular injection of the pharmaceutical composition into the joint of the subject.

[0390] In some embodiments, the present disclosure provides a pharmaceutical composition for the treatment or prevention of a joint disease or condition, the composition including a therapeutically effective amount of one or more nucleic acids encoding a Clustered Regularly Interspaced Short Palindromic Repeats (CRISPR) gene-editing system. The system includes a CRISPR Associated Protein 9 (Cas9) protein, and at least one guide RNA targeting an HIF1A gene, wherein the target sequence is adjacent to a protospacer adjacent motif (PAM) sequence for the Cas9 protein. In some embodiments, the at least one guide RNA includes a crRNA sequence that is complementary to a target sequence in any one of exons of the HIF1A gene. In some embodiments, the at least one guide RNA includes a crRNA sequence that is complementary to a target sequence in one of exons disclosed herein of the HIF1A gene. In some embodiments, the at least one guide RNA has a crRNA sequence having at least 75% identity to a sequence selected from SEQ ID NOs: 1631-1655. In some embodiments, the at least one guide RNA has a crRNA sequence having at least 80% identity to a sequence selected from SEQ ID NOs: 1631-1655. In some embodiments, the at least one guide RNA has a crRNA sequence having at least 85% identity to a sequence selected from SEQ ID NOs: 1631-1655. In some embodiments, the at least one guide RNA has a crRNA sequence having at least 90% identity to a sequence selected from SEQ ID NOs: 1631-1655. In some embodiments, the at least one guide RNA has a crRNA sequence having at least 95% identity to a sequence selected from SEQ ID NOs: 1631-1655. In some embodiments, the at least one guide RNA has a crRNA sequence selected from SEQ ID NOs: 1631-1655.

[0391] In some embodiments, the present disclosure provides method for the treatment or prevention of a joint disease or condition in a subject in need thereof. The method includes administering, to a joint of the subject, a pharmaceutical composition including a pharmaceutically effective amount of a composition having one or more nucleic acids encoding a Clustered Regularly Interspaced Short Palindromic Repeats (CRISPR) gene-editing system. The system includes a CRISPR Associated Protein 9 (Cas9) protein, and at least one guide RNA targeting an HIF1A gene, wherein the target sequence is adjacent to a protospacer adjacent motif (PAM) sequence for the Cas9 protein. In some embodiments, the at least one guide RNA includes a crRNA sequence that is complementary to a target sequence in any one of exons of the HIF1A gene. In some embodiments, the at least one guide RNA includes a crRNA sequence that is complementary to a target sequence in one of exons disclosed herein of the HIF1A gene. In some embodiments, the at least one guide RNA has a crRNA sequence having at least 75% identity to a sequence selected from SEQ ID NOs: 1631-1655. In some embodiments, the at least one guide RNA has a crRNA sequence having at least 80% identity to a sequence selected from SEQ ID NOs: 1631-1655. In some embodiments, the at least one guide RNA has a crRNA sequence having at least 85% identity to a sequence selected from SEQ ID NOs: 1631-1655. In some embodiments, the at least one guide RNA has a crRNA sequence having at least 90% identity to a sequence selected from SEQ ID NOs: 1631-1655. In some embodiments, the at least one guide RNA has a crRNA sequence having at least 95% identity to a sequence selected from SEQ ID NOs: 1631-1655. In some embodiments, the at least one guide RNA has a crRNA sequence selected from SEQ ID NOs: 1631-1655. In some embodiments, the joint disease or condition is arthritis, e.g., osteoarthritis. In some embodiments, the administering includes intra-articular injection of the pharmaceutical composition into the joint of the subject.

[0392] In some embodiments, the present disclosure provides a pharmaceutical composition for the treatment or prevention of a joint disease or condition, the composition including a therapeutically effective amount of one or more nucleic acids encoding a Clustered Regularly Interspaced Short Palindromic Repeats (CRISPR) gene-editing system. The system includes a CRISPR Associated Protein 9 (Cas9) protein, and at least one guide RNA targeting an MAPK1 gene, wherein the target sequence is adjacent to a protospacer adjacent motif (PAM) sequence for the Cas9 protein. In some embodiments, the at least one guide RNA includes a crRNA sequence that is complementary to a target sequence in any one of exons of the MAPK1 gene. In some embodiments, the at least one guide RNA includes a crRNA sequence that is complementary to a target sequence in one of exons disclosed herein of the MAPK1 gene. In some embodiments, the at least one guide RNA has a crRNA sequence having at least 75% identity to a sequence selected from SEQ ID NOs: 1656-1680. In some embodiments, the at least one guide RNA has a crRNA sequence having at least 80% identity to a sequence selected from SEQ ID NOs: 1656-1680. In some embodiments, the at least one guide RNA has a crRNA sequence having at least 85% identity to a sequence selected from SEQ ID NOs: 1656-1680. In some embodiments, the at least one guide RNA has a crRNA sequence having at least 90% identity to a sequence selected from SEQ ID NOs: 1656-1680. In some embodiments, the at least one guide RNA has a crRNA sequence having at least 95% identity to a sequence selected from SEQ ID NOs: 1656-1680. In some embodiments, the at least one guide RNA has a crRNA sequence selected from SEQ ID NOs: 1656-1680.

[0393] In some embodiments, the present disclosure provides method for the treatment or prevention of a joint disease or condition in a subject in need thereof. The method includes administering, to a joint of the subject, a pharmaceutical composition including a pharmaceutically effective amount of a composition having one or more nucleic acids encoding a Clustered Regularly Interspaced Short Palindromic Repeats (CRISPR) gene-editing system. The system includes a CRISPR Associated Protein 9 (Cas9) protein, and at least one guide RNA targeting an MAPK1 gene, wherein the target sequence is adjacent to a protospacer adjacent motif (PAM) sequence for the Cas9 protein. In some embodiments, the at least one guide RNA includes a crRNA sequence that is complementary to a target sequence in any one of exons of the MAPK1 gene. In some embodiments, the at least one guide RNA includes a crRNA sequence that is complementary to a target sequence in one of exons disclosed herein of the MAPK1 gene. In some embodiments, the at least one guide RNA has a crRNA sequence having at least 75% identity to a sequence selected from SEQ ID NOs: 1656-1680. In some embodiments, the at least one guide RNA has a crRNA sequence having at least 80% identity to a sequence selected from SEQ ID NOs: 1656-1680. In some embodiments, the at least one guide RNA has a crRNA sequence having at least 85% identity to a sequence selected from SEQ ID NOs: 1656-1680. In some embodiments, the at least one guide RNA has a crRNA sequence having at least 90% identity to a sequence selected from SEQ ID NOs: 1656-1680. In some embodiments, the at least one guide RNA has a crRNA sequence having at least 95% identity to a sequence selected from SEQ ID NOs: 1656-1680. In some embodiments, the at least one guide RNA has a crRNA sequence selected from SEQ ID NOs: 1656-1680. In some embodiments, the joint disease or condition is arthritis, e.g., osteoarthritis. In some embodiments, the administering includes intra-articular injection of the pharmaceutical composition into the joint of the subject.

[0394] In some embodiments, the present disclosure provides a pharmaceutical composition for the treatment or prevention of a joint disease or condition, the composition including a therapeutically effective amount of one or more nucleic acids encoding a Clustered Regularly Interspaced Short Palindromic Repeats (CRISPR) gene-editing system. The system includes a CRISPR Associated Protein 9 (Cas9) protein, and at least one guide RNA targeting an NOX1 gene, wherein the target sequence is adjacent to a protospacer adjacent motif (PAM) sequence for the Cas9 protein. In some embodiments, the at least one guide RNA includes a crRNA sequence that is complementary to a target sequence in any one of exons of the NOX1 gene. In some embodiments, the at least one guide RNA includes a crRNA sequence that is complementary to a target sequence in one of exons disclosed herein of the NOX1 gene. In some embodiments, the at least one guide RNA has a crRNA sequence having at least 75% identity to a sequence selected from SEQ ID NOs: 1681-1705. In some embodiments, the at least one guide RNA has a crRNA sequence having at least 80% identity to a sequence selected from SEQ ID NOs: 1681-1705. In some embodiments, the at least one guide RNA has a crRNA sequence having at least 85% identity to a sequence selected from SEQ ID NOs: 1681-1705. In some embodiments, the at least one guide RNA has a crRNA sequence having at least 90% identity to a sequence selected from SEQ ID NOs: 1681-1705. In some embodiments, the at least one guide RNA has a crRNA sequence having at least 95% identity to a sequence selected from SEQ ID NOs: 1681-1705. In some embodiments, the at least one guide RNA has a crRNA sequence selected from SEQ ID NOs: 1681-1705.

[0395] In some embodiments, the present disclosure provides method for the treatment or prevention of a joint disease or condition in a subject in need thereof. The method includes administering, to a joint of the subject, a pharmaceutical composition including a pharmaceutically effective amount of a composition having one or more nucleic acids encoding a Clustered Regularly Interspaced Short Palindromic Repeats (CRISPR) gene-editing system. The system includes a CRISPR Associated Protein 9 (Cas9) protein, and at least one guide RNA targeting an NOX1 gene, wherein the target sequence is adjacent to a protospacer adjacent motif (PAM) sequence for the Cas9 protein. In some embodiments, the at least one guide RNA includes a crRNA sequence that is complementary to a target sequence in any one of exons of the NOX1 gene. In some embodiments, the at least one guide RNA includes a crRNA sequence that is complementary to a target sequence in one of exons disclosed herein of the NOX1 gene. In some embodiments, the at least one guide RNA has a crRNA sequence having at least 75% identity to a sequence selected from SEQ ID NOs: 1681-1705. In some embodiments, the at least one guide RNA has a crRNA sequence having at least 80% identity to a sequence selected from SEQ ID NOs: 1681-1705. In some embodiments, the at least one guide RNA has a crRNA sequence having at least 85% identity to a sequence selected from SEQ ID NOs: 1681-1705. In some embodiments, the at least one guide RNA has a crRNA sequence having at least 90% identity to a sequence selected from SEQ ID NOs: 1681-1705. In some embodiments, the at least one guide RNA has a crRNA sequence having at least 95% identity to a sequence selected from SEQ ID NOs: 1681-1705. In some embodiments, the at least one guide RNA has a crRNA sequence selected from SEQ ID NOs: 1681-1705. In some embodiments, the joint disease or condition is arthritis, e.g., osteoarthritis. In some embodiments, the administering includes intra-articular injection of the pharmaceutical composition into the joint of the subject.

[0396] In some embodiments, the present disclosure provides a pharmaceutical composition for the treatment or prevention of a joint disease or condition, the composition including a therapeutically effective amount of one or more nucleic acids encoding a Clustered Regularly Interspaced Short Palindromic Repeats (CRISPR) gene-editing system. The system includes a CRISPR Associated Protein 9 (Cas9) protein, and at least one guide RNA targeting an NOX3 gene, wherein the target sequence is adjacent to a protospacer adjacent motif (PAM) sequence for the Cas9 protein. In some embodiments, the at least one guide RNA includes a crRNA sequence that is complementary to a target sequence in any one of exons of the NOX3 gene. In some embodiments, the at least one guide RNA includes a crRNA sequence that is complementary to a target sequence in one of exons disclosed herein of the NOX3 gene. In some embodiments, the at least one guide RNA has a crRNA sequence having at least 75% identity to a sequence selected from SEQ ID NOs: 1706-1730. In some embodiments, the at least one guide RNA has a crRNA sequence having at least 80% identity to a sequence selected from SEQ ID NOs: 1706-1730. In some embodiments, the at least one guide RNA has a crRNA sequence having at least 85% identity to a sequence selected from SEQ ID NOs: 1706-1730. In some embodiments, the at least one guide RNA has a crRNA sequence having at least 90% identity to a sequence selected from SEQ ID NOs: 1706-1730. In some embodiments, the at least one guide RNA has a crRNA sequence having at least 95% identity to a sequence selected from SEQ ID NOs: 1706-1730. In some embodiments, the at least one guide RNA has a crRNA sequence selected from SEQ ID NOs: 1706-1730.

[0397] In some embodiments, the present disclosure provides method for the treatment or prevention of a joint disease or condition in a subject in need thereof. The method includes administering, to a joint of the subject, a pharmaceutical composition including a pharmaceutically effective amount of a composition having one or more nucleic acids encoding a Clustered Regularly Interspaced Short Palindromic Repeats (CRISPR) gene-editing system. The system includes a CRISPR Associated Protein 9 (Cas9) protein, and at least one guide RNA targeting an NOX3 gene, wherein the target sequence is adjacent to a protospacer adjacent motif (PAM) sequence for the Cas9 protein. In some embodiments, the at least one guide RNA includes a crRNA sequence that is complementary to a target sequence in any one of exons of the NOX3 gene. In some embodiments, the at least one guide RNA includes a crRNA sequence that is complementary to a target sequence in one of exons disclosed herein of the NOX3 gene. In some embodiments, the at least one guide RNA has a crRNA sequence having at least 75% identity to a sequence selected from SEQ ID NOs: 1706-1730. In some embodiments, the at least one guide RNA has a crRNA sequence having at least 80% identity to a sequence selected from SEQ ID NOs: 1706-1730. In some embodiments, the at least one guide RNA has a crRNA sequence having at least 85% identity to a sequence selected from SEQ ID NOs: 1706-1730. In some embodiments, the at least one guide RNA has a crRNA sequence having at least 90% identity to a sequence selected from SEQ ID NOs: 1706-1730. In some embodiments, the at least one guide RNA has a crRNA sequence having at least 95% identity to a sequence selected from SEQ ID NOs: 1706-1730. In some embodiments, the at least one guide RNA has a crRNA sequence selected from SEQ ID NOs: 1706-1730. In some embodiments, the joint disease or condition is arthritis, e.g., osteoarthritis. In some embodiments, the administering includes intra-articular injection of the pharmaceutical composition into the joint of the subject.

[0398] In some embodiments, the present disclosure provides a pharmaceutical composition for the treatment or prevention of a joint disease or condition, the composition including a therapeutically effective amount of one or more nucleic acids encoding a Clustered Regularly Interspaced Short Palindromic Repeats (CRISPR) gene-editing system. The system includes a CRISPR Associated Protein 9 (Cas9) protein, and at least one guide RNA targeting an NOX4 gene, wherein the target sequence is adjacent to a protospacer adjacent motif (PAM) sequence for the Cas9 protein. In some embodiments, the at least one guide RNA includes a crRNA sequence that is complementary to a target sequence in any one of exons of the NOX4 gene. In some embodiments, the at least one guide RNA includes a crRNA sequence that is complementary to a target sequence in one of exons disclosed herein of the NOX4 gene. In some embodiments, the at least one guide RNA has a crRNA sequence having at least 75% identity to a sequence selected from SEQ ID NOs: 1731-1755. In some embodiments, the at least one guide RNA has a crRNA sequence having at least 80% identity to a sequence selected from SEQ ID NOs: 1731-1755. In some embodiments, the at least one guide RNA has a crRNA sequence having at least 85% identity to a sequence selected from SEQ ID NOs: 1731-1755. In some embodiments, the at least one guide RNA has a crRNA sequence having at least 90% identity to a sequence selected from SEQ ID NOs: 1731-1755. In some embodiments, the at least one guide RNA has a crRNA sequence having at least 95% identity to a sequence selected from SEQ ID NOs: 1731-1755. In some embodiments, the at least one guide RNA has a crRNA sequence selected from SEQ ID NOs: 1731-1755. In some embodiments, the at least one guide RNA has a crRNA sequence having at least 75% identity to a sequence selected from SEQ ID NOs: 5148-5322. In some embodiments, the at least one guide RNA has a crRNA sequence having at least 80% identity to a sequence selected from SEQ ID NOs: 5148-5322. In some embodiments, the at least one guide RNA has a crRNA sequence having at least 85% identity to a sequence selected from SEQ ID NOs: 5148-5322. In some embodiments, the at least one guide RNA has a crRNA sequence having at least 90% identity to a sequence selected from SEQ ID NOs: 5148-5322. In some embodiments, the at least one guide RNA has a crRNA sequence having at least 95% identity to a sequence selected from SEQ ID NOs: 5148-5322. In some embodiments, the at least one guide RNA has a crRNA sequence selected from SEQ ID NOs: 5148-5322.

[0399] In some embodiments, the present disclosure provides method for the treatment or prevention of a joint disease or condition in a subject in need thereof. The method includes administering, to a joint of the subject, a pharmaceutical composition including a pharmaceutically effective amount of a composition having one or more nucleic acids encoding a Clustered Regularly Interspaced Short Palindromic Repeats (CRISPR) gene-editing system. The system includes a CRISPR Associated Protein 9 (Cas9) protein, and at least one guide RNA targeting an NOX4 gene, wherein the target sequence is adjacent to a protospacer adjacent motif (PAM) sequence for the Cas9 protein. In some embodiments, the at least one guide RNA includes a crRNA sequence that is complementary to a target sequence in any one of exons of the NOX4 gene. In some embodiments, the at least one guide RNA includes a crRNA sequence that is complementary to a target sequence in one of exons disclosed herein of the NOX4 gene. In some embodiments, the at least one guide RNA has a crRNA sequence having at least 75% identity to a sequence selected from SEQ ID NOs: 1731-1755. In some embodiments, the at least one guide RNA has a crRNA sequence having at least 80% identity to a sequence selected from SEQ ID NOs: 1731-1755. In some embodiments, the at least one guide RNA has a crRNA sequence having at least 85% identity to a sequence selected from SEQ ID NOs: 1731-1755. In some embodiments, the at least one guide RNA has a crRNA sequence having at least 90% identity to a sequence selected from SEQ ID NOs: 1731-1755. In some embodiments, the at least one guide RNA has a crRNA sequence having at least 95% identity to a sequence selected from SEQ ID NOs: 1731-1755. In some embodiments, the at least one guide RNA has a crRNA sequence selected from SEQ ID NOs: 1731-1755. In some embodiments, the at least one guide RNA has a crRNA sequence having at least 75% identity to a sequence selected from SEQ ID NOs: 5148-5322. In some embodiments, the at least one guide RNA has a crRNA sequence having at least 80% identity to a sequence selected from SEQ ID NOs: 5148-5322. In some embodiments, the at least one guide RNA has a crRNA sequence having at least 85% identity to a sequence selected from SEQ ID NOs: 5148-5322. In some embodiments, the at least one guide RNA has a crRNA sequence having at least 90% identity to a sequence selected from SEQ ID NOs: 5148-5322. In some embodiments, the at least one guide RNA has a crRNA sequence having at least 95% identity to a sequence selected from SEQ ID NOs: 5148-5322. In some embodiments, the at least one guide RNA has a crRNA sequence selected from SEQ ID NOs: 5148-5322. In some embodiments, the joint disease or condition is arthritis, e.g., osteoarthritis. In some embodiments, the administering includes intra-articular injection of the pharmaceutical composition into the joint of the subject.

[0400] In some embodiments, the present disclosure provides a pharmaceutical composition for the treatment or prevention of a joint disease or condition, the composition including a therapeutically effective amount of one or more nucleic acids encoding a Clustered Regularly Interspaced Short Palindromic Repeats (CRISPR) gene-editing system. The system includes a CRISPR Associated Protein 9 (Cas9) protein, and at least one guide RNA targeting an NOX5 gene, wherein the target sequence is adjacent to a protospacer adjacent motif (PAM) sequence for the Cas9 protein. In some embodiments, the at least one guide RNA includes a crRNA sequence that is complementary to a target sequence in any one of exons of the NOX5 gene. In some embodiments, the at least one guide RNA includes a crRNA sequence that is complementary to a target sequence in one of exons disclosed herein of the NOX5 gene. In some embodiments, the at least one guide RNA has a crRNA sequence having at least 75% identity to a sequence selected from SEQ ID NOs: 1756-1780. In some embodiments, the at least one guide RNA has a crRNA sequence having at least 80% identity to a sequence selected from SEQ ID NOs: 1756-1780. In some embodiments, the at least one guide RNA has a crRNA sequence having at least 85% identity to a sequence selected from SEQ ID NOs: 1756-1780. In some embodiments, the at least one guide RNA has a crRNA sequence having at least 90% identity to a sequence selected from SEQ ID NOs: 1756-1780. In some embodiments, the at least one guide RNA has a crRNA sequence having at least 95% identity to a sequence selected from SEQ ID NOs: 1756-1780. In some embodiments, the at least one guide RNA has a crRNA sequence selected from SEQ ID NOs: 1756-1780.

[0401] In some embodiments, the present disclosure provides method for the treatment or prevention of a joint disease or condition in a subject in need thereof. The method includes administering, to a joint of the subject, a pharmaceutical composition including a pharmaceutically effective amount of a composition having one or more nucleic acids encoding a Clustered Regularly Interspaced Short Palindromic Repeats (CRISPR) gene-editing system. The system includes a CRISPR Associated Protein 9 (Cas9) protein, and at least one guide RNA targeting an NOX5 gene, wherein the target sequence is adjacent to a protospacer adjacent motif (PAM) sequence for the Cas9 protein. In some embodiments, the at least one guide RNA includes a crRNA sequence that is complementary to a target sequence in any one of exons of the NOX5 gene. In some embodiments, the at least one guide RNA includes a crRNA sequence that is complementary to a target sequence in one of exons disclosed herein of the NOX5 gene. In some embodiments, the at least one guide RNA has a crRNA sequence having at least 75% identity to a sequence selected from SEQ ID NOs: 1756-1780. In some embodiments, the at least one guide RNA has a crRNA sequence having at least 80% identity to a sequence selected from SEQ ID NOs: 1756-1780. In some embodiments, the at least one guide RNA has a crRNA sequence having at least 85% identity to a sequence selected from SEQ ID NOs: 1756-1780. In some embodiments, the at least one guide RNA has a crRNA sequence having at least 90% identity to a sequence selected from SEQ ID NOs: 1756-1780. In some embodiments, the at least one guide RNA has a crRNA sequence having at least 95% identity to a sequence selected from SEQ ID NOs: 1756-1780. In some embodiments, the at least one guide RNA has a crRNA sequence selected from SEQ ID NOs: 1756-1780. In some embodiments, the joint disease or condition is arthritis, e.g., osteoarthritis. In some embodiments, the administering includes intra-articular injection of the pharmaceutical composition into the joint of the subject.

[0402] In some embodiments, the present disclosure provides a pharmaceutical composition for the treatment or prevention of a joint disease or condition, the composition including a therapeutically effective amount of one or more nucleic acids encoding a Clustered Regularly Interspaced Short Palindromic Repeats (CRISPR) gene-editing system. The system includes a CRISPR Associated Protein 9 (Cas9) protein, and at least one guide RNA targeting an NDUFS1 gene, wherein the target sequence is adjacent to a protospacer adjacent motif (PAM) sequence for the Cas9 protein. In some embodiments, the at least one guide RNA includes a crRNA sequence that is complementary to a target sequence in any one of exons of the NDUFS1 gene. In some embodiments, the at least one guide RNA includes a crRNA sequence that is complementary to a target sequence in one of exons disclosed herein of the NDUFS1 gene. In some embodiments, the at least one guide RNA has a crRNA sequence having at least 75% identity to a sequence selected from SEQ ID NOs: 1781-1805. In some embodiments, the at least one guide RNA has a crRNA sequence having at least 80% identity to a sequence selected from SEQ ID NOs: 1781-1805. In some embodiments, the at least one guide RNA has a crRNA sequence having at least 85% identity to a sequence selected from SEQ ID NOs: 1781-1805. In some embodiments, the at least one guide RNA has a crRNA sequence having at least 90% identity to a sequence selected from SEQ ID NOs: 1781-1805. In some embodiments, the at least one guide RNA has a crRNA sequence having at least 95% identity to a sequence selected from SEQ ID NOs: 1781-1805. In some embodiments, the at least one guide RNA has a crRNA sequence selected from SEQ ID NOs: 1781-1805.

[0403] In some embodiments, the present disclosure provides method for the treatment or prevention of a joint disease or condition in a subject in need thereof. The method includes administering, to a joint of the subject, a pharmaceutical composition including a pharmaceutically effective amount of a composition having one or more nucleic acids encoding a Clustered Regularly Interspaced Short Palindromic Repeats (CRISPR) gene-editing system. The system includes a CRISPR Associated Protein 9 (Cas9) protein, and at least one guide RNA targeting an NDUFS1 gene, wherein the target sequence is adjacent to a protospacer adjacent motif (PAM) sequence for the Cas9 protein. In some embodiments, the at least one guide RNA includes a crRNA sequence that is complementary to a target sequence in any one of exons of the NDUFS1 gene. In some embodiments, the at least one guide RNA includes a crRNA sequence that is complementary to a target sequence in one of exons disclosed herein of the NDUFS1 gene. In some embodiments, the at least one guide RNA has a crRNA sequence having at least 75% identity to a sequence selected from SEQ ID NOs: 1781-1805. In some embodiments, the at least one guide RNA has a crRNA sequence having at least 80% identity to a sequence selected from SEQ ID NOs: 1781-1805. In some embodiments, the at least one guide RNA has a crRNA sequence having at least 85% identity to a sequence selected from SEQ ID NOs: 1781-1805. In some embodiments, the at least one guide RNA has a crRNA sequence having at least 90% identity to a sequence selected from SEQ ID NOs: 1781-1805. In some embodiments, the at least one guide RNA has a crRNA sequence having at least 95% identity to a sequence selected from SEQ ID NOs: 1781-1805. In some embodiments, the at least one guide RNA has a crRNA sequence selected from SEQ ID NOs: 1781-1805. In some embodiments, the joint disease or condition is arthritis, e.g., osteoarthritis. In some embodiments, the administering includes intra-articular injection of the pharmaceutical composition into the joint of the subject.

[0404] In some embodiments, the present disclosure provides a pharmaceutical composition for the treatment or prevention of a joint disease or condition, the composition including a therapeutically effective amount of one or more nucleic acids encoding a Clustered Regularly Interspaced Short Palindromic Repeats (CRISPR) gene-editing system. The system includes a CRISPR Associated Protein 9 (Cas9) protein, and at least one guide RNA targeting an NDUFA1 gene, wherein the target sequence is adjacent to a protospacer adjacent motif (PAM) sequence for the Cas9 protein. In some embodiments, the at least one guide RNA includes a crRNA sequence that is complementary to a target sequence in any one of exons of the NDUFA1 gene. In some embodiments, the at least one guide RNA includes a crRNA sequence that is complementary to a target sequence in one of exons disclosed herein of the NDUFA1 gene. In some embodiments, the at least one guide RNA has a crRNA sequence having at least 75% identity to a sequence selected from SEQ ID NOs: 1806-1829. In some embodiments, the at least one guide RNA has a crRNA sequence having at least 80% identity to a sequence selected from SEQ ID NOs: 1806-1829. In some embodiments, the at least one guide RNA has a crRNA sequence having at least 85% identity to a sequence selected from SEQ ID NOs: 1806-1829. In some embodiments, the at least one guide RNA has a crRNA sequence having at least 90% identity to a sequence selected from SEQ ID NOs: 1806-1829. In some embodiments, the at least one guide RNA has a crRNA sequence having at least 95% identity to a sequence selected from SEQ ID NOs: 1806-1829. In some embodiments, the at least one guide RNA has a crRNA sequence selected from SEQ ID NOs: 1806-1829.

[0405] In some embodiments, the present disclosure provides method for the treatment or prevention of a joint disease or condition in a subject in need thereof. The method includes administering, to a joint of the subject, a pharmaceutical composition including a pharmaceutically effective amount of a composition having one or more nucleic acids encoding a Clustered Regularly Interspaced Short Palindromic Repeats (CRISPR) gene-editing system. The system includes a CRISPR Associated Protein 9 (Cas9) protein, and at least one guide RNA targeting an NDUFA1 gene, wherein the target sequence is adjacent to a protospacer adjacent motif (PAM) sequence for the Cas9 protein. In some embodiments, the at least one guide RNA includes a crRNA sequence that is complementary to a target sequence in any one of exons of the NDUFA1 gene. In some embodiments, the at least one guide RNA includes a crRNA sequence that is complementary to a target sequence in one of exons disclosed herein of the NDUFA1 gene. In some embodiments, the at least one guide RNA has a crRNA sequence having at least 75% identity to a sequence selected from SEQ ID NOs: 1806-1829. In some embodiments, the at least one guide RNA has a crRNA sequence having at least 80% identity to a sequence selected from SEQ ID NOs: 1806-1829. In some embodiments, the at least one guide RNA has a crRNA sequence having at least 85% identity to a sequence selected from SEQ ID NOs: 1806-1829. In some embodiments, the at least one guide RNA has a crRNA sequence having at least 90% identity to a sequence selected from SEQ ID NOs: 1806-1829. In some embodiments, the at least one guide RNA has a crRNA sequence having at least 95% identity to a sequence selected from SEQ ID NOs: 1806-1829. In some embodiments, the at least one guide RNA has a crRNA sequence selected from SEQ ID NOs: 1806-1829. In some embodiments, the joint disease or condition is arthritis, e.g., osteoarthritis. In some embodiments, the administering includes intra-articular injection of the pharmaceutical composition into the joint of the subject.

[0406] In some embodiments, the present disclosure provides a pharmaceutical composition for the treatment or prevention of a joint disease or condition, the composition including a therapeutically effective amount of one or more nucleic acids encoding a Clustered Regularly Interspaced Short Palindromic Repeats (CRISPR) gene-editing system. The system includes a CRISPR Associated Protein 9 (Cas9) protein, and at least one guide RNA targeting an NFKB1 gene, wherein the target sequence is adjacent to a protospacer adjacent motif (PAM) sequence for the Cas9 protein. In some embodiments, the at least one guide RNA includes a crRNA sequence that is complementary to a target sequence in any one of exons of the NFKB1 gene. In some embodiments, the at least one guide RNA includes a crRNA sequence that is complementary to a target sequence in one of exons disclosed herein of the NFKB1 gene. In some embodiments, the at least one guide RNA has a crRNA sequence having at least 75% identity to a sequence selected from SEQ ID NOs: 1830-1854. In some embodiments, the at least one guide RNA has a crRNA sequence having at least 80% identity to a sequence selected from SEQ ID NOs: 1830-1854. In some embodiments, the at least one guide RNA has a crRNA sequence having at least 85% identity to a sequence selected from SEQ ID NOs: 1830-1854. In some embodiments, the at least one guide RNA has a crRNA sequence having at least 90% identity to a sequence selected from SEQ ID NOs: 1830-1854. In some embodiments, the at least one guide RNA has a crRNA sequence having at least 95% identity to a sequence selected from SEQ ID NOs: 1830-1854. In some embodiments, the at least one guide RNA has a crRNA sequence selected from SEQ ID NOs: 1830-1854.

[0407] In some embodiments, the present disclosure provides method for the treatment or prevention of a joint disease or condition in a subject in need thereof. The method includes administering, to a joint of the subject, a pharmaceutical composition including a pharmaceutically effective amount of a composition having one or more nucleic acids encoding a Clustered Regularly Interspaced Short Palindromic Repeats (CRISPR) gene-editing system. The system includes a CRISPR Associated Protein 9 (Cas9) protein, and at least one guide RNA targeting an NFKB1 gene, wherein the target sequence is adjacent to a protospacer adjacent motif (PAM) sequence for the Cas9 protein. In some embodiments, the at least one guide RNA includes a crRNA sequence that is complementary to a target sequence in any one of exons of the NFKB1 gene. In some embodiments, the at least one guide RNA includes a crRNA sequence that is complementary to a target sequence in one of exons disclosed herein of the NFKB1 gene. In some embodiments, the at least one guide RNA has a crRNA sequence having at least 75% identity to a sequence selected from SEQ ID NOs: 1830-1854. In some embodiments, the at least one guide RNA has a crRNA sequence having at least 80% identity to a sequence selected from SEQ ID NOs: 1830-1854. In some embodiments, the at least one guide RNA has a crRNA sequence having at least 85% identity to a sequence selected from SEQ ID NOs: 1830-1854. In some embodiments, the at least one guide RNA has a crRNA sequence having at least 90% identity to a sequence selected from SEQ ID NOs: 1830-1854. In some embodiments, the at least one guide RNA has a crRNA sequence having at least 95% identity to a sequence selected from SEQ ID NOs: 1830-1854. In some embodiments, the at least one guide RNA has a crRNA sequence selected from SEQ ID NOs: 1830-1854. In some embodiments, the joint disease or condition is arthritis, e.g., osteoarthritis. In some embodiments, the administering includes intra-articular injection of the pharmaceutical composition into the joint of the subject.

[0408] In some embodiments, the present disclosure provides a pharmaceutical composition for the treatment or prevention of a joint disease or condition, the composition including a therapeutically effective amount of one or more nucleic acids encoding a Clustered Regularly Interspaced Short Palindromic Repeats (CRISPR) gene-editing system. The system includes a CRISPR Associated Protein 9 (Cas9) protein, and at least one guide RNA targeting an NFKB2 gene, wherein the target sequence is adjacent to a protospacer adjacent motif (PAM) sequence for the Cas9 protein. In some embodiments, the at least one guide RNA includes a crRNA sequence that is complementary to a target sequence in any one of exons of the NFKB2 gene. In some embodiments, the at least one guide RNA includes a crRNA sequence that is complementary to a target sequence in one of exons disclosed herein of the NFKB2 gene. In some embodiments, the at least one guide RNA has a crRNA sequence having at least 75% identity to a sequence selected from SEQ ID NOs: 1855-1879. In some embodiments, the at least one guide RNA has a crRNA sequence having at least 80% identity to a sequence selected from SEQ ID NOs: 1855-1879. In some embodiments, the at least one guide RNA has a crRNA sequence having at least 85% identity to a sequence selected from SEQ ID NOs: 1855-1879. In some embodiments, the at least one guide RNA has a crRNA sequence having at least 90% identity to a sequence selected from SEQ ID NOs: 1855-1879. In some embodiments, the at least one guide RNA has a crRNA sequence having at least 95% identity to a sequence selected from SEQ ID NOs: 1855-1879. In some embodiments, the at least one guide RNA has a crRNA sequence selected from SEQ ID NOs: 1855-1879.

[0409] In some embodiments, the present disclosure provides method for the treatment or prevention of a joint disease or condition in a subject in need thereof. The method includes administering, to a joint of the subject, a pharmaceutical composition including a pharmaceutically effective amount of a composition having one or more nucleic acids encoding a Clustered Regularly Interspaced Short Palindromic Repeats (CRISPR) gene-editing system. The system includes a CRISPR Associated Protein 9 (Cas9) protein, and at least one guide RNA targeting an NFKB2 gene, wherein the target sequence is adjacent to a protospacer adjacent motif (PAM) sequence for the Cas9 protein. In some embodiments, the at least one guide RNA includes a crRNA sequence that is complementary to a target sequence in any one of exons of the NFKB2 gene. In some embodiments, the at least one guide RNA includes a crRNA sequence that is complementary to a target sequence in one of exons disclosed herein of the NFKB2 gene. In some embodiments, the at least one guide RNA has a crRNA sequence having at least 75% identity to a sequence selected from SEQ ID NOs: 1855-1879. In some embodiments, the at least one guide RNA has a crRNA sequence having at least 80% identity to a sequence selected from SEQ ID NOs: 1855-1879. In some embodiments, the at least one guide RNA has a crRNA sequence having at least 85% identity to a sequence selected from SEQ ID NOs: 1855-1879. In some embodiments, the at least one guide RNA has a crRNA sequence having at least 90% identity to a sequence selected from SEQ ID NOs: 1855-1879. In some embodiments, the at least one guide RNA has a crRNA sequence having at least 95% identity to a sequence selected from SEQ ID NOs: 1855-1879. In some embodiments, the at least one guide RNA has a crRNA sequence selected from SEQ ID NOs: 1855-1879. In some embodiments, the joint disease or condition is arthritis, e.g., osteoarthritis. In some embodiments, the administering includes intra-articular injection of the pharmaceutical composition into the joint of the subject.

[0410] In some embodiments, the present disclosure provides a pharmaceutical composition for the treatment or prevention of a joint disease or condition, the composition including a therapeutically effective amount of one or more nucleic acids encoding a Clustered Regularly Interspaced Short Palindromic Repeats (CRISPR) gene-editing system. The system includes a CRISPR Associated Protein 9 (Cas9) protein, and at least one guide RNA targeting an IKBKG gene, wherein the target sequence is adjacent to a protospacer adjacent motif (PAM) sequence for the Cas9 protein. In some embodiments, the at least one guide RNA includes a crRNA sequence that is complementary to a target sequence in any one of exons of the IKBKG gene. In some embodiments, the at least one guide RNA includes a crRNA sequence that is complementary to a target sequence in one of exons disclosed herein of the IKBKG gene. In some embodiments, the at least one guide RNA has a crRNA sequence having at least 75% identity to a sequence selected from SEQ ID NOs: 1880-1904. In some embodiments, the at least one guide RNA has a crRNA sequence having at least 80% identity to a sequence selected from SEQ ID NOs: 1880-1904. In some embodiments, the at least one guide RNA has a crRNA sequence having at least 85% identity to a sequence selected from SEQ ID NOs: 1880-1904. In some embodiments, the at least one guide RNA has a crRNA sequence having at least 90% identity to a sequence selected from SEQ ID NOs: 1880-1904. In some embodiments, the at least one guide RNA has a crRNA sequence having at least 95% identity to a sequence selected from SEQ ID NOs: 1880-1904. In some embodiments, the at least one guide RNA has a crRNA sequence selected from SEQ ID NOs: 1880-1904.

[0411] In some embodiments, the present disclosure provides method for the treatment or prevention of a joint disease or condition in a subject in need thereof. The method includes administering, to a joint of the subject, a pharmaceutical composition including a pharmaceutically effective amount of a composition having one or more nucleic acids encoding a Clustered Regularly Interspaced Short Palindromic Repeats (CRISPR) gene-editing system. The system includes a CRISPR Associated Protein 9 (Cas9) protein, and at least one guide RNA targeting an IKBKG gene, wherein the target sequence is adjacent to a protospacer adjacent motif (PAM) sequence for the Cas9 protein. In some embodiments, the at least one guide RNA includes a crRNA sequence that is complementary to a target sequence in any one of exons of the IKBKG gene. In some embodiments, the at least one guide RNA includes a crRNA sequence that is complementary to a target sequence in one of exons disclosed herein of the IKBKG gene. In some embodiments, the at least one guide RNA has a crRNA sequence having at least 75% identity to a sequence selected from SEQ ID NOs: 1880-1904. In some embodiments, the at least one guide RNA has a crRNA sequence having at least 80% identity to a sequence selected from SEQ ID NOs: 1880-1904. In some embodiments, the at least one guide RNA has a crRNA sequence having at least 85% identity to a sequence selected from SEQ ID NOs: 1880-1904. In some embodiments, the at least one guide RNA has a crRNA sequence having at least 90% identity to a sequence selected from SEQ ID NOs: 1880-1904. In some embodiments, the at least one guide RNA has a crRNA sequence having at least 95% identity to a sequence selected from SEQ ID NOs: 1880-1904. In some embodiments, the at least one guide RNA has a crRNA sequence selected from SEQ ID NOs: 1880-1904. In some embodiments, the joint disease or condition is arthritis, e.g., osteoarthritis. In some embodiments, the administering includes intra-articular injection of the pharmaceutical composition into the joint of the subject.

[0412] In some embodiments, the present disclosure provides a pharmaceutical composition for the treatment or prevention of a joint disease or condition, the composition including a therapeutically effective amount of one or more nucleic acids encoding a Clustered Regularly Interspaced Short Palindromic Repeats (CRISPR) gene-editing system. The system includes a CRISPR Associated Protein 9 (Cas9) protein, and at least one guide RNA targeting an SHC1 gene, wherein the target sequence is adjacent to a protospacer adjacent motif (PAM) sequence for the Cas9 protein. In some embodiments, the at least one guide RNA includes a crRNA sequence that is complementary to a target sequence in any one of exons of the SHC1 gene. In some embodiments, the at least one guide RNA includes a crRNA sequence that is complementary to a target sequence in one of exons disclosed herein of the SHC1 gene. In some embodiments, the at least one guide RNA has a crRNA sequence having at least 75% identity to a sequence selected from SEQ ID NOs: 1905-1929. In some embodiments, the at least one guide RNA has a crRNA sequence having at least 80% identity to a sequence selected from SEQ ID NOs: 1905-1929. In some embodiments, the at least one guide RNA has a crRNA sequence having at least 85% identity to a sequence selected from SEQ ID NOs: 1905-1929. In some embodiments, the at least one guide RNA has a crRNA sequence having at least 90% identity to a sequence selected from SEQ ID NOs: 1905-1929. In some embodiments, the at least one guide RNA has a crRNA sequence having at least 95% identity to a sequence selected from SEQ ID NOs: 1905-1929. In some embodiments, the at least one guide RNA has a crRNA sequence selected from SEQ ID NOs: 1905-1929.

[0413] In some embodiments, the present disclosure provides method for the treatment or prevention of a joint disease or condition in a subject in need thereof. The method includes administering, to a joint of the subject, a pharmaceutical composition including a pharmaceutically effective amount of a composition having one or more nucleic acids encoding a Clustered Regularly Interspaced Short Palindromic Repeats (CRISPR) gene-editing system. The system includes a CRISPR Associated Protein 9 (Cas9) protein, and at least one guide RNA targeting an SHC1 gene, wherein the target sequence is adjacent to a protospacer adjacent motif (PAM) sequence for the Cas9 protein. In some embodiments, the at least one guide RNA includes a crRNA sequence that is complementary to a target sequence in any one of exons of the SHC1 gene. In some embodiments, the at least one guide RNA includes a crRNA sequence that is complementary to a target sequence in one of exons disclosed herein of the SHC1 gene. In some embodiments, the at least one guide RNA has a crRNA sequence having at least 75% identity to a sequence selected from SEQ ID NOs: 1905-1929. In some embodiments, the at least one guide RNA has a crRNA sequence having at least 80% identity to a sequence selected from SEQ ID NOs: 1905-1929. In some embodiments, the at least one guide RNA has a crRNA sequence having at least 85% identity to a sequence selected from SEQ ID NOs: 1905-1929. In some embodiments, the at least one guide RNA has a crRNA sequence having at least 90% identity to a sequence selected from SEQ ID NOs: 1905-1929. In some embodiments, the at least one guide RNA has a crRNA sequence having at least 95% identity to a sequence selected from SEQ ID NOs: 1905-1929. In some embodiments, the at least one guide RNA has a crRNA sequence selected from SEQ ID NOs: 1905-1929. In some embodiments, the joint disease or condition is arthritis, e.g., osteoarthritis. In some embodiments, the administering includes intra-articular injection of the pharmaceutical composition into the joint of the subject.

[0414] In some embodiments, the present disclosure provides a pharmaceutical composition for the treatment or prevention of a joint disease or condition, the composition including a therapeutically effective amount of one or more nucleic acids encoding a Clustered Regularly Interspaced Short Palindromic Repeats (CRISPR) gene-editing system. The system includes a CRISPR Associated Protein 9 (Cas9) protein, and at least one guide RNA targeting an SHC2 gene, wherein the target sequence is adjacent to a protospacer adjacent motif (PAM) sequence for the Cas9 protein. In some embodiments, the at least one guide RNA includes a crRNA sequence that is complementary to a target sequence in any one of exons of the SHC2 gene. In some embodiments, the at least one guide RNA includes a crRNA sequence that is complementary to a target sequence in one of exons disclosed herein of the SHC2 gene. In some embodiments, the at least one guide RNA has a crRNA sequence having at least 75% identity to a sequence selected from SEQ ID NOs: 1930-1954. In some embodiments, the at least one guide RNA has a crRNA sequence having at least 80% identity to a sequence selected from SEQ ID NOs: 1930-1954. In some embodiments, the at least one guide RNA has a crRNA sequence having at least 85% identity to a sequence selected from SEQ ID NOs: 1930-1954. In some embodiments, the at least one guide RNA has a crRNA sequence having at least 90% identity to a sequence selected from SEQ ID NOs: 1930-1954. In some embodiments, the at least one guide RNA has a crRNA sequence having at least 95% identity to a sequence selected from SEQ ID NOs: 1930-1954. In some embodiments, the at least one guide RNA has a crRNA sequence selected from SEQ ID NOs: 1930-1954.

[0415] In some embodiments, the present disclosure provides method for the treatment or prevention of a joint disease or condition in a subject in need thereof. The method includes administering, to a joint of the subject, a pharmaceutical composition including a pharmaceutically effective amount of a composition having one or more nucleic acids encoding a Clustered Regularly Interspaced Short Palindromic Repeats (CRISPR) gene-editing system. The system includes a CRISPR Associated Protein 9 (Cas9) protein, and at least one guide RNA targeting an SHC2 gene, wherein the target sequence is adjacent to a protospacer adjacent motif (PAM) sequence for the Cas9 protein. In some embodiments, the at least one guide RNA includes a crRNA sequence that is complementary to a target sequence in any one of exons of the SHC2 gene. In some embodiments, the at least one guide RNA includes a crRNA sequence that is complementary to a target sequence in one of exons disclosed herein of the SHC2 gene. In some embodiments, the at least one guide RNA has a crRNA sequence having at least 75% identity to a sequence selected from SEQ ID NOs: 1930-1954. In some embodiments, the at least one guide RNA has a crRNA sequence having at least 80% identity to a sequence selected from SEQ ID NOs: 1930-1954. In some embodiments, the at least one guide RNA has a crRNA sequence having at least 85% identity to a sequence selected from SEQ ID NOs: 1930-1954. In some embodiments, the at least one guide RNA has a crRNA sequence having at least 90% identity to a sequence selected from SEQ ID NOs: 1930-1954. In some embodiments, the at least one guide RNA has a crRNA sequence having at least 95% identity to a sequence selected from SEQ ID NOs: 1930-1954. In some embodiments, the at least one guide RNA has a crRNA sequence selected from SEQ ID NOs: 1930-1954. In some embodiments, the joint disease or condition is arthritis, e.g., osteoarthritis. In some embodiments, the administering includes intra-articular injection of the pharmaceutical composition into the joint of the subject.

[0416] In some embodiments, the present disclosure provides a pharmaceutical composition for the treatment or prevention of a joint disease or condition, the composition including a therapeutically effective amount of one or more nucleic acids encoding a Clustered Regularly Interspaced Short Palindromic Repeats (CRISPR) gene-editing system. The system includes a CRISPR Associated Protein 9 (Cas9) protein, and at least one guide RNA targeting an SHC3 gene, wherein the target sequence is adjacent to a protospacer adjacent motif (PAM) sequence for the Cas9 protein. In some embodiments, the at least one guide RNA includes a crRNA sequence that is complementary to a target sequence in any one of exons of the SHC3 gene. In some embodiments, the at least one guide RNA includes a crRNA sequence that is complementary to a target sequence in one of exons disclosed herein of the SHC3 gene. In some embodiments, the at least one guide RNA has a crRNA sequence having at least 75% identity to a sequence selected from SEQ ID NOs: 1955-1979. In some embodiments, the at least one guide RNA has a crRNA sequence having at least 80% identity to a sequence selected from SEQ ID NOs: 1955-1979. In some embodiments, the at least one guide RNA has a crRNA sequence having at least 85% identity to a sequence selected from SEQ ID NOs: 1955-1979. In some embodiments, the at least one guide RNA has a crRNA sequence having at least 90% identity to a sequence selected from SEQ ID NOs: 1955-1979. In some embodiments, the at least one guide RNA has a crRNA sequence having at least 95% identity to a sequence selected from SEQ ID NOs: 1955-1979. In some embodiments, the at least one guide RNA has a crRNA sequence selected from SEQ ID NOs: 1955-1979.

[0417] In some embodiments, the present disclosure provides method for the treatment or prevention of a joint disease or condition in a subject in need thereof. The method includes administering, to a joint of the subject, a pharmaceutical composition including a pharmaceutically effective amount of a composition having one or more nucleic acids encoding a Clustered Regularly Interspaced Short Palindromic Repeats (CRISPR) gene-editing system. The system includes a CRISPR Associated Protein 9 (Cas9) protein, and at least one guide RNA targeting an SHC3 gene, wherein the target sequence is adjacent to a protospacer adjacent motif (PAM) sequence for the Cas9 protein. In some embodiments, the at least one guide RNA includes a crRNA sequence that is complementary to a target sequence in any one of exons of the SHC3 gene. In some embodiments, the at least one guide RNA includes a crRNA sequence that is complementary to a target sequence in one of exons disclosed herein of the SHC3 gene. In some embodiments, the at least one guide RNA has a crRNA sequence having at least 75% identity to a sequence selected from SEQ ID NOs: 1955-1979. In some embodiments, the at least one guide RNA has a crRNA sequence having at least 80% identity to a sequence selected from SEQ ID NOs: 1955-1979. In some embodiments, the at least one guide RNA has a crRNA sequence having at least 85% identity to a sequence selected from SEQ ID NOs: 1955-1979. In some embodiments, the at least one guide RNA has a crRNA sequence having at least 90% identity to a sequence selected from SEQ ID NOs: 1955-1979. In some embodiments, the at least one guide RNA has a crRNA sequence having at least 95% identity to a sequence selected from SEQ ID NOs: 1955-1979. In some embodiments, the at least one guide RNA has a crRNA sequence selected from SEQ ID NOs: 1955-1979. In some embodiments, the joint disease or condition is arthritis, e.g., osteoarthritis. In some embodiments, the administering includes intra-articular injection of the pharmaceutical composition into the joint of the subject.

[0418] In some embodiments, the present disclosure provides a pharmaceutical composition for the treatment or prevention of a joint disease or condition, the composition including a therapeutically effective amount of one or more nucleic acids encoding a Clustered Regularly Interspaced Short Palindromic Repeats (CRISPR) gene-editing system. The system includes a CRISPR Associated Protein 9 (Cas9) protein, and at least one guide RNA targeting an SHC4 gene, wherein the target sequence is adjacent to a protospacer adjacent motif (PAM) sequence for the Cas9 protein. In some embodiments, the at least one guide RNA includes a crRNA sequence that is complementary to a target sequence in any one of exons of the SHC4 gene. In some embodiments, the at least one guide RNA includes a crRNA sequence that is complementary to a target sequence in one of exons disclosed herein of the SHC4 gene. In some embodiments, the at least one guide RNA has a crRNA sequence having at least 75% identity to a sequence selected from SEQ ID NOs: 1980-2004. In some embodiments, the at least one guide RNA has a crRNA sequence having at least 80% identity to a sequence selected from SEQ ID NOs: 1980-2004. In some embodiments, the at least one guide RNA has a crRNA sequence having at least 85% identity to a sequence selected from SEQ ID NOs: 1980-2004. In some embodiments, the at least one guide RNA has a crRNA sequence having at least 90% identity to a sequence selected from SEQ ID NOs: 1980-2004. In some embodiments, the at least one guide RNA has a crRNA sequence having at least 95% identity to a sequence selected from SEQ ID NOs: 1980-2004. In some embodiments, the at least one guide RNA has a crRNA sequence selected from SEQ ID NOs: 1980-2004.

[0419] In some embodiments, the present disclosure provides method for the treatment or prevention of a joint disease or condition in a subject in need thereof. The method includes administering, to a joint of the subject, a pharmaceutical composition including a pharmaceutically effective amount of a composition having one or more nucleic acids encoding a Clustered Regularly Interspaced Short Palindromic Repeats (CRISPR) gene-editing system. The system includes a CRISPR Associated Protein 9 (Cas9) protein, and at least one guide RNA targeting an SHC4 gene, wherein the target sequence is adjacent to a protospacer adjacent motif (PAM) sequence for the Cas9 protein. In some embodiments, the at least one guide RNA includes a crRNA sequence that is complementary to a target sequence in any one of exons of the SHC4 gene. In some embodiments, the at least one guide RNA includes a crRNA sequence that is complementary to a target sequence in one of exons disclosed herein of the SHC4 gene. In some embodiments, the at least one guide RNA has a crRNA sequence having at least 75% identity to a sequence selected from SEQ ID NOs: 1980-2004. In some embodiments, the at least one guide RNA has a crRNA sequence having at least 80% identity to a sequence selected from SEQ ID NOs: 1980-2004. In some embodiments, the at least one guide RNA has a crRNA sequence having at least 85% identity to a sequence selected from SEQ ID NOs: 1980-2004. In some embodiments, the at least one guide RNA has a crRNA sequence having at least 90% identity to a sequence selected from SEQ ID NOs: 1980-2004. In some embodiments, the at least one guide RNA has a crRNA sequence having at least 95% identity to a sequence selected from SEQ ID NOs: 1980-2004. In some embodiments, the at least one guide RNA has a crRNA sequence selected from SEQ ID NOs: 1980-2004. In some embodiments, the joint disease or condition is arthritis, e.g., osteoarthritis. In some embodiments, the administering includes intra-articular injection of the pharmaceutical composition into the joint of the subject.

[0420] In some embodiments, the present disclosure provides a pharmaceutical composition for the treatment or prevention of a joint disease or condition, the composition including a therapeutically effective amount of one or more nucleic acids encoding a Clustered Regularly Interspaced Short Palindromic Repeats (CRISPR) gene-editing system. The system includes a CRISPR Associated Protein 9 (Cas9) protein, and at least one guide RNA targeting an BBC3 gene, wherein the target sequence is adjacent to a protospacer adjacent motif (PAM) sequence for the Cas9 protein. In some embodiments, the at least one guide RNA includes a crRNA sequence that is complementary to a target sequence in any one of exons of the BBC3 gene. In some embodiments, the at least one guide RNA includes a crRNA sequence that is complementary to a target sequence in one of exons disclosed herein of the BBC3 gene. In some embodiments, the at least one guide RNA has a crRNA sequence having at least 75% identity to a sequence selected from SEQ ID NOs: 2005-2029. In some embodiments, the at least one guide RNA has a crRNA sequence having at least 80% identity to a sequence selected from SEQ ID NOs: 2005-2029. In some embodiments, the at least one guide RNA has a crRNA sequence having at least 85% identity to a sequence selected from SEQ ID NOs: 2005-2029. In some embodiments, the at least one guide RNA has a crRNA sequence having at least 90% identity to a sequence selected from SEQ ID NOs: 2005-2029. In some embodiments, the at least one guide RNA has a crRNA sequence having at least 95% identity to a sequence selected from SEQ ID NOs: 2005-2029. In some embodiments, the at least one guide RNA has a crRNA sequence selected from SEQ ID NOs: 2005-2029.

[0421] In some embodiments, the present disclosure provides method for the treatment or prevention of a joint disease or condition in a subject in need thereof. The method includes administering, to a joint of the subject, a pharmaceutical composition including a pharmaceutically effective amount of a composition having one or more nucleic acids encoding a Clustered Regularly Interspaced Short Palindromic Repeats (CRISPR) gene-editing system. The system includes a CRISPR Associated Protein 9 (Cas9) protein, and at least one guide RNA targeting an BBC3 gene, wherein the target sequence is adjacent to a protospacer adjacent motif (PAM) sequence for the Cas9 protein. In some embodiments, the at least one guide RNA includes a crRNA sequence that is complementary to a target sequence in any one of exons of the BBC3 gene. In some embodiments, the at least one guide RNA includes a crRNA sequence that is complementary to a target sequence in one of exons disclosed herein of the BBC3 gene. In some embodiments, the at least one guide RNA has a crRNA sequence having at least 75% identity to a sequence selected from SEQ ID NOs: 2005-2029. In some embodiments, the at least one guide RNA has a crRNA sequence having at least 80% identity to a sequence selected from SEQ ID NOs: 2005-2029. In some embodiments, the at least one guide RNA has a crRNA sequence having at least 85% identity to a sequence selected from SEQ ID NOs: 2005-2029. In some embodiments, the at least one guide RNA has a crRNA sequence having at least 90% identity to a sequence selected from SEQ ID NOs: 2005-2029. In some embodiments, the at least one guide RNA has a crRNA sequence having at least 95% identity to a sequence selected from SEQ ID NOs: 2005-2029. In some embodiments, the at least one guide RNA has a crRNA sequence selected from SEQ ID NOs: 2005-2029. In some embodiments, the joint disease or condition is arthritis, e.g., osteoarthritis. In some embodiments, the administering includes intra-articular injection of the pharmaceutical composition into the joint of the subject.

[0422] In some embodiments, the present disclosure provides a pharmaceutical composition for the treatment or prevention of a joint disease or condition, the composition including a therapeutically effective amount of one or more nucleic acids encoding a Clustered Regularly Interspaced Short Palindromic Repeats (CRISPR) gene-editing system. The system includes a CRISPR Associated Protein 9 (Cas9) protein, and at least one guide RNA targeting an PIK3CA gene, wherein the target sequence is adjacent to a protospacer adjacent motif (PAM) sequence for the Cas9 protein. In some embodiments, the at least one guide RNA includes a crRNA sequence that is complementary to a target sequence in any one of exons of the PIK3CA gene. In some embodiments, the at least one guide RNA includes a crRNA sequence that is complementary to a target sequence in one of exons disclosed herein of the PIK3CA gene. In some embodiments, the at least one guide RNA has a crRNA sequence having at least 75% identity to a sequence selected from SEQ ID NOs: 2030-2054. In some embodiments, the at least one guide RNA has a crRNA sequence having at least 80% identity to a sequence selected from SEQ ID NOs: 2030-2054. In some embodiments, the at least one guide RNA has a crRNA sequence having at least 85% identity to a sequence selected from SEQ ID NOs: 2030-2054. In some embodiments, the at least one guide RNA has a crRNA sequence having at least 90% identity to a sequence selected from SEQ ID NOs: 2030-2054. In some embodiments, the at least one guide RNA has a crRNA sequence having at least 95% identity to a sequence selected from SEQ ID NOs: 2030-2054. In some embodiments, the at least one guide RNA has a crRNA sequence selected from SEQ ID NOs: 2030-2054.

[0423] In some embodiments, the present disclosure provides method for the treatment or prevention of a joint disease or condition in a subject in need thereof. The method includes administering, to a joint of the subject, a pharmaceutical composition including a pharmaceutically effective amount of a composition having one or more nucleic acids encoding a Clustered Regularly Interspaced Short Palindromic Repeats (CRISPR) gene-editing system. The system includes a CRISPR Associated Protein 9 (Cas9) protein, and at least one guide RNA targeting an PIK3CA gene, wherein the target sequence is adjacent to a protospacer adjacent motif (PAM) sequence for the Cas9 protein. In some embodiments, the at least one guide RNA includes a crRNA sequence that is complementary to a target sequence in any one of exons of the PIK3CA gene. In some embodiments, the at least one guide RNA includes a crRNA sequence that is complementary to a target sequence in one of exons disclosed herein of the PIK3CA gene. In some embodiments, the at least one guide RNA has a crRNA sequence having at least 75% identity to a sequence selected from SEQ ID NOs: 2030-2054. In some embodiments, the at least one guide RNA has a crRNA sequence having at least 80% identity to a sequence selected from SEQ ID NOs: 2030-2054. In some embodiments, the at least one guide RNA has a crRNA sequence having at least 85% identity to a sequence selected from SEQ ID NOs: 2030-2054. In some embodiments, the at least one guide RNA has a crRNA sequence having at least 90% identity to a sequence selected from SEQ ID NOs: 2030-2054. In some embodiments, the at least one guide RNA has a crRNA sequence having at least 95% identity to a sequence selected from SEQ ID NOs: 2030-2054. In some embodiments, the at least one guide RNA has a crRNA sequence selected from SEQ ID NOs: 2030-2054. In some embodiments, the joint disease or condition is arthritis, e.g., osteoarthritis. In some embodiments, the administering includes intra-articular injection of the pharmaceutical composition into the joint of the subject.

[0424] In some embodiments, the present disclosure provides a pharmaceutical composition for the treatment or prevention of a joint disease or condition, the composition including a therapeutically effective amount of one or more nucleic acids encoding a Clustered Regularly Interspaced Short Palindromic Repeats (CRISPR) gene-editing system. The system includes a CRISPR Associated Protein 9 (Cas9) protein, and at least one guide RNA targeting an PIK3CB gene, wherein the target sequence is adjacent to a protospacer adjacent motif (PAM) sequence for the Cas9 protein. In some embodiments, the at least one guide RNA includes a crRNA sequence that is complementary to a target sequence in any one of exons of the PIK3CB gene. In some embodiments, the at least one guide RNA includes a crRNA sequence that is complementary to a target sequence in one of exons disclosed herein of the PIK3CB gene. In some embodiments, the at least one guide RNA has a crRNA sequence having at least 75% identity to a sequence selected from SEQ ID NOs: 2055-2079. In some embodiments, the at least one guide RNA has a crRNA sequence having at least 80% identity to a sequence selected from SEQ ID NOs: 2055-2079. In some embodiments, the at least one guide RNA has a crRNA sequence having at least 85% identity to a sequence selected from SEQ ID NOs: 2055-2079. In some embodiments, the at least one guide RNA has a crRNA sequence having at least 90% identity to a sequence selected from SEQ ID NOs: 2055-2079. In some embodiments, the at least one guide RNA has a crRNA sequence having at least 95% identity to a sequence selected from SEQ ID NOs: 2055-2079. In some embodiments, the at least one guide RNA has a crRNA sequence selected from SEQ ID NOs: 2055-2079.

[0425] In some embodiments, the present disclosure provides method for the treatment or prevention of a joint disease or condition in a subject in need thereof. The method includes administering, to a joint of the subject, a pharmaceutical composition including a pharmaceutically effective amount of a composition having one or more nucleic acids encoding a Clustered Regularly Interspaced Short Palindromic Repeats (CRISPR) gene-editing system. The system includes a CRISPR Associated Protein 9 (Cas9) protein, and at least one guide RNA targeting an PIK3CB gene, wherein the target sequence is adjacent to a protospacer adjacent motif (PAM) sequence for the Cas9 protein. In some embodiments, the at least one guide RNA includes a crRNA sequence that is complementary to a target sequence in any one of exons of the PIK3CB gene. In some embodiments, the at least one guide RNA includes a crRNA sequence that is complementary to a target sequence in one of exons disclosed herein of the PIK3CB gene. In some embodiments, the at least one guide RNA has a crRNA sequence having at least 75% identity to a sequence selected from SEQ ID NOs: 2055-2079. In some embodiments, the at least one guide RNA has a crRNA sequence having at least 80% identity to a sequence selected from SEQ ID NOs: 2055-2079. In some embodiments, the at least one guide RNA has a crRNA sequence having at least 85% identity to a sequence selected from SEQ ID NOs: 2055-2079. In some embodiments, the at least one guide RNA has a crRNA sequence having at least 90% identity to a sequence selected from SEQ ID NOs: 2055-2079. In some embodiments, the at least one guide RNA has a crRNA sequence having at least 95% identity to a sequence selected from SEQ ID NOs: 2055-2079. In some embodiments, the at least one guide RNA has a crRNA sequence selected from SEQ ID NOs: 2055-2079. In some embodiments, the joint disease or condition is arthritis, e.g., osteoarthritis. In some embodiments, the administering includes intra-articular injection of the pharmaceutical composition into the joint of the subject.

[0426] In some embodiments, the present disclosure provides a pharmaceutical composition for the treatment or prevention of a joint disease or condition, the composition including a therapeutically effective amount of one or more nucleic acids encoding a Clustered Regularly Interspaced Short Palindromic Repeats (CRISPR) gene-editing system. The system includes a CRISPR Associated Protein 9 (Cas9) protein, and at least one guide RNA targeting an PIK3CG gene, wherein the target sequence is adjacent to a protospacer adjacent motif (PAM) sequence for the Cas9 protein. In some embodiments, the at least one guide RNA includes a crRNA sequence that is complementary to a target sequence in any one of exons of the PIK3CG gene. In some embodiments, the at least one guide RNA includes a crRNA sequence that is complementary to a target sequence in one of exons disclosed herein of the PIK3CG gene. In some embodiments, the at least one guide RNA has a crRNA sequence having at least 75% identity to a sequence selected from SEQ ID NOs: 2080-2104. In some embodiments, the at least one guide RNA has a crRNA sequence having at least 80% identity to a sequence selected from SEQ ID NOs: 2080-2104. In some embodiments, the at least one guide RNA has a crRNA sequence having at least 85% identity to a sequence selected from SEQ ID NOs: 2080-2104. In some embodiments, the at least one guide RNA has a crRNA sequence having at least 90% identity to a sequence selected from SEQ ID NOs: 2080-2104. In some embodiments, the at least one guide RNA has a crRNA sequence having at least 95% identity to a sequence selected from SEQ ID NOs: 2080-2104. In some embodiments, the at least one guide RNA has a crRNA sequence selected from SEQ ID NOs: 2080-2104.

[0427] In some embodiments, the present disclosure provides method for the treatment or prevention of a joint disease or condition in a subject in need thereof. The method includes administering, to a joint of the subject, a pharmaceutical composition including a pharmaceutically effective amount of a composition having one or more nucleic acids encoding a Clustered Regularly Interspaced Short Palindromic Repeats (CRISPR) gene-editing system. The system includes a CRISPR Associated Protein 9 (Cas9) protein, and at least one guide RNA targeting an PIK3CG gene, wherein the target sequence is adjacent to a protospacer adjacent motif (PAM) sequence for the Cas9 protein. In some embodiments, the at least one guide RNA includes a crRNA sequence that is complementary to a target sequence in any one of exons of the PIK3CG gene. In some embodiments, the at least one guide RNA includes a crRNA sequence that is complementary to a target sequence in one of exons disclosed herein of the PIK3CG gene. In some embodiments, the at least one guide RNA has a crRNA sequence having at least 75% identity to a sequence selected from SEQ ID NOs: 2080-2104. In some embodiments, the at least one guide RNA has a crRNA sequence having at least 80% identity to a sequence selected from SEQ ID NOs: 2080-2104. In some embodiments, the at least one guide RNA has a crRNA sequence having at least 85% identity to a sequence selected from SEQ ID NOs: 2080-2104. In some embodiments, the at least one guide RNA has a crRNA sequence having at least 90% identity to a sequence selected from SEQ ID NOs: 2080-2104. In some embodiments, the at least one guide RNA has a crRNA sequence having at least 95% identity to a sequence selected from SEQ ID NOs: 2080-2104. In some embodiments, the at least one guide RNA has a crRNA sequence selected from SEQ ID NOs: 2080-2104. In some embodiments, the joint disease or condition is arthritis, e.g., osteoarthritis. In some embodiments, the administering includes intra-articular injection of the pharmaceutical composition into the joint of the subject.

[0428] In some embodiments, the present disclosure provides a pharmaceutical composition for the treatment or prevention of a joint disease or condition, the composition including a therapeutically effective amount of one or more nucleic acids encoding a Clustered Regularly Interspaced Short Palindromic Repeats (CRISPR) gene-editing system. The system includes a CRISPR Associated Protein 9 (Cas9) protein, and at least one guide RNA targeting an PRODH gene, wherein the target sequence is adjacent to a protospacer adjacent motif (PAM) sequence for the Cas9 protein. In some embodiments, the at least one guide RNA includes a crRNA sequence that is complementary to a target sequence in any one of exons of the PRODH gene. In some embodiments, the at least one guide RNA includes a crRNA sequence that is complementary to a target sequence in one of exons disclosed herein of the PRODH gene. In some embodiments, the at least one guide RNA has a crRNA sequence having at least 75% identity to a sequence selected from SEQ ID NOs: 2105-2129. In some embodiments, the at least one guide RNA has a crRNA sequence having at least 80% identity to a sequence selected from SEQ ID NOs: 2105-2129. In some embodiments, the at least one guide RNA has a crRNA sequence having at least 85% identity to a sequence selected from SEQ ID NOs: 2105-2129. In some embodiments, the at least one guide RNA has a crRNA sequence having at least 90% identity to a sequence selected from SEQ ID NOs: 2105-2129. In some embodiments, the at least one guide RNA has a crRNA sequence having at least 95% identity to a sequence selected from SEQ ID NOs: 2105-2129. In some embodiments, the at least one guide RNA has a crRNA sequence selected from SEQ ID NOs: 2105-2129.

[0429] In some embodiments, the present disclosure provides method for the treatment or prevention of a joint disease or condition in a subject in need thereof. The method includes administering, to a joint of the subject, a pharmaceutical composition including a pharmaceutically effective amount of a composition having one or more nucleic acids encoding a Clustered Regularly Interspaced Short Palindromic Repeats (CRISPR) gene-editing system. The system includes a CRISPR Associated Protein 9 (Cas9) protein, and at least one guide RNA targeting an PRODH gene, wherein the target sequence is adjacent to a protospacer adjacent motif (PAM) sequence for the Cas9 protein. In some embodiments, the at least one guide RNA includes a crRNA sequence that is complementary to a target sequence in any one of exons of the PRODH gene. In some embodiments, the at least one guide RNA includes a crRNA sequence that is complementary to a target sequence in one of exons disclosed herein of the PRODH gene. In some embodiments, the at least one guide RNA has a crRNA sequence having at least 75% identity to a sequence selected from SEQ ID NOs: 2105-2129. In some embodiments, the at least one guide RNA has a crRNA sequence having at least 80% identity to a sequence selected from SEQ ID NOs: 2105-2129. In some embodiments, the at least one guide RNA has a crRNA sequence having at least 85% identity to a sequence selected from SEQ ID NOs: 2105-2129. In some embodiments, the at least one guide RNA has a crRNA sequence having at least 90% identity to a sequence selected from SEQ ID NOs: 2105-2129. In some embodiments, the at least one guide RNA has a crRNA sequence having at least 95% identity to a sequence selected from SEQ ID NOs: 2105-2129. In some embodiments, the at least one guide RNA has a crRNA sequence selected from SEQ ID NOs: 2105-2129. In some embodiments, the joint disease or condition is arthritis, e.g., osteoarthritis. In some embodiments, the administering includes intra-articular injection of the pharmaceutical composition into the joint of the subject.

[0430] In some embodiments, the present disclosure provides a pharmaceutical composition for the treatment or prevention of a joint disease or condition, the composition including a therapeutically effective amount of one or more nucleic acids encoding a Clustered Regularly Interspaced Short Palindromic Repeats (CRISPR) gene-editing system. The system includes a CRISPR Associated Protein 9 (Cas9) protein, and at least one guide RNA targeting an PRODH2 gene, wherein the target sequence is adjacent to a protospacer adjacent motif (PAM) sequence for the Cas9 protein. In some embodiments, the at least one guide RNA includes a crRNA sequence that is complementary to a target sequence in any one of exons of the PRODH2 gene. In some embodiments, the at least one guide RNA includes a crRNA sequence that is complementary to a target sequence in one of exons disclosed herein of the PRODH2 gene. In some embodiments, the at least one guide RNA has a crRNA sequence having at least 75% identity to a sequence selected from SEQ ID NOs: 2130-2154. In some embodiments, the at least one guide RNA has a crRNA sequence having at least 80% identity to a sequence selected from SEQ ID NOs: 2130-2154. In some embodiments, the at least one guide RNA has a crRNA sequence having at least 85% identity to a sequence selected from SEQ ID NOs: 2130-2154. In some embodiments, the at least one guide RNA has a crRNA sequence having at least 90% identity to a sequence selected from SEQ ID NOs: 2130-2154. In some embodiments, the at least one guide RNA has a crRNA sequence having at least 95% identity to a sequence selected from SEQ ID NOs: 2130-2154. In some embodiments, the at least one guide RNA has a crRNA sequence selected from SEQ ID NOs: 2130-2154.

[0431] In some embodiments, the present disclosure provides method for the treatment or prevention of a joint disease or condition in a subject in need thereof. The method includes administering, to a joint of the subject, a pharmaceutical composition including a pharmaceutically effective amount of a composition having one or more nucleic acids encoding a Clustered Regularly Interspaced Short Palindromic Repeats (CRISPR) gene-editing system. The system includes a CRISPR Associated Protein 9 (Cas9) protein, and at least one guide RNA targeting an PRODH2 gene, wherein the target sequence is adjacent to a protospacer adjacent motif (PAM) sequence for the Cas9 protein. In some embodiments, the at least one guide RNA includes a crRNA sequence that is complementary to a target sequence in any one of exons of the PRODH2 gene. In some embodiments, the at least one guide RNA includes a crRNA sequence that is complementary to a target sequence in one of exons disclosed herein of the PRODH2 gene. In some embodiments, the at least one guide RNA has a crRNA sequence having at least 75% identity to a sequence selected from SEQ ID NOs: 2130-2154. In some embodiments, the at least one guide RNA has a crRNA sequence having at least 80% identity to a sequence selected from SEQ ID NOs: 2130-2154. In some embodiments, the at least one guide RNA has a crRNA sequence having at least 85% identity to a sequence selected from SEQ ID NOs: 2130-2154. In some embodiments, the at least one guide RNA has a crRNA sequence having at least 90% identity to a sequence selected from SEQ ID NOs: 2130-2154. In some embodiments, the at least one guide RNA has a crRNA sequence having at least 95% identity to a sequence selected from SEQ ID NOs: 2130-2154. In some embodiments, the at least one guide RNA has a crRNA sequence selected from SEQ ID NOs: 2130-2154. In some embodiments, the joint disease or condition is arthritis, e.g., osteoarthritis. In some embodiments, the administering includes intra-articular injection of the pharmaceutical composition into the joint of the subject.

[0432] In some embodiments, the present disclosure provides a pharmaceutical composition for the treatment or prevention of a joint disease or condition, the composition including a therapeutically effective amount of one or more nucleic acids encoding a Clustered Regularly Interspaced Short Palindromic Repeats (CRISPR) gene-editing system. The system includes a CRISPR Associated Protein 9 (Cas9) protein, and at least one guide RNA targeting an NQO1 gene, wherein the target sequence is adjacent to a protospacer adjacent motif (PAM) sequence for the Cas9 protein. In some embodiments, the at least one guide RNA includes a crRNA sequence that is complementary to a target sequence in any one of exons of the NQO1 gene. In some embodiments, the at least one guide RNA includes a crRNA sequence that is complementary to a target sequence in one of exons disclosed herein of the NQO1 gene. In some embodiments, the at least one guide RNA has a crRNA sequence having at least 75% identity to a sequence selected from SEQ ID NOs: 2155-2179. In some embodiments, the at least one guide RNA has a crRNA sequence having at least 80% identity to a sequence selected from SEQ ID NOs: 2155-2179. In some embodiments, the at least one guide RNA has a crRNA sequence having at least 85% identity to a sequence selected from SEQ ID NOs: 2155-2179. In some embodiments, the at least one guide RNA has a crRNA sequence having at least 90% identity to a sequence selected from SEQ ID NOs: 2155-2179. In some embodiments, the at least one guide RNA has a crRNA sequence having at least 95% identity to a sequence selected from SEQ ID NOs: 2155-2179. In some embodiments, the at least one guide RNA has a crRNA sequence selected from SEQ ID NOs: 2155-2179.

[0433] In some embodiments, the present disclosure provides method for the treatment or prevention of a joint disease or condition in a subject in need thereof. The method includes administering, to a joint of the subject, a pharmaceutical composition including a pharmaceutically effective amount of a composition having one or more nucleic acids encoding a Clustered Regularly Interspaced Short Palindromic Repeats (CRISPR) gene-editing system. The system includes a CRISPR Associated Protein 9 (Cas9) protein, and at least one guide RNA targeting an NQO1 gene, wherein the target sequence is adjacent to a protospacer adjacent motif (PAM) sequence for the Cas9 protein. In some embodiments, the at least one guide RNA includes a crRNA sequence that is complementary to a target sequence in any one of exons of the NQO1 gene. In some embodiments, the at least one guide RNA includes a crRNA sequence that is complementary to a target sequence in one of exons disclosed herein of the NQO1 gene. In some embodiments, the at least one guide RNA has a crRNA sequence having at least 75% identity to a sequence selected from SEQ ID NOs: 2155-2179. In some embodiments, the at least one guide RNA has a crRNA sequence having at least 80% identity to a sequence selected from SEQ ID NOs: 2155-2179. In some embodiments, the at least one guide RNA has a crRNA sequence having at least 85% identity to a sequence selected from SEQ ID NOs: 2155-2179. In some embodiments, the at least one guide RNA has a crRNA sequence having at least 90% identity to a sequence selected from SEQ ID NOs: 2155-2179. In some embodiments, the at least one guide RNA has a crRNA sequence having at least 95% identity to a sequence selected from SEQ ID NOs: 2155-2179. In some embodiments, the at least one guide RNA has a crRNA sequence selected from SEQ ID NOs: 2155-2179. In some embodiments, the joint disease or condition is arthritis, e.g., osteoarthritis. In some embodiments, the administering includes intra-articular injection of the pharmaceutical composition into the joint of the subject.

[0434] In some embodiments, the present disclosure provides a pharmaceutical composition for the treatment or prevention of a joint disease or condition, the composition including a therapeutically effective amount of one or more nucleic acids encoding a Clustered Regularly Interspaced Short Palindromic Repeats (CRISPR) gene-editing system. The system includes a CRISPR Associated Protein 9 (Cas9) protein, and at least one guide RNA targeting an NDUFV2 gene, wherein the target sequence is adjacent to a protospacer adjacent motif (PAM) sequence for the Cas9 protein. In some embodiments, the at least one guide RNA includes a crRNA sequence that is complementary to a target sequence in any one of exons of the NDUFV2 gene. In some embodiments, the at least one guide RNA includes a crRNA sequence that is complementary to a target sequence in one of exons disclosed herein of the NDUFV2 gene. In some embodiments, the at least one guide RNA has a crRNA sequence having at least 75% identity to a sequence selected from SEQ ID NOs: 2180-2204. In some embodiments, the at least one guide RNA has a crRNA sequence having at least 80% identity to a sequence selected from SEQ ID NOs: 2180-2204. In some embodiments, the at least one guide RNA has a crRNA sequence having at least 85% identity to a sequence selected from SEQ ID NOs: 2180-2204. In some embodiments, the at least one guide RNA has a crRNA sequence having at least 90% identity to a sequence selected from SEQ ID NOs: 2180-2204. In some embodiments, the at least one guide RNA has a crRNA sequence having at least 95% identity to a sequence selected from SEQ ID NOs: 2180-2204. In some embodiments, the at least one guide RNA has a crRNA sequence selected from SEQ ID NOs: 2180-2204.

[0435] In some embodiments, the present disclosure provides method for the treatment or prevention of a joint disease or condition in a subject in need thereof. The method includes administering, to a joint of the subject, a pharmaceutical composition including a pharmaceutically effective amount of a composition having one or more nucleic acids encoding a Clustered Regularly Interspaced Short Palindromic Repeats (CRISPR) gene-editing system. The system includes a CRISPR Associated Protein 9 (Cas9) protein, and at least one guide RNA targeting an NDUFV2 gene, wherein the target sequence is adjacent to a protospacer adjacent motif (PAM) sequence for the Cas9 protein. In some embodiments, the at least one guide RNA includes a crRNA sequence that is complementary to a target sequence in any one of exons of the NDUFV2 gene. In some embodiments, the at least one guide RNA includes a crRNA sequence that is complementary to a target sequence in one of exons disclosed herein of the NDUFV2 gene. In some embodiments, the at least one guide RNA has a crRNA sequence having at least 75% identity to a sequence selected from SEQ ID NOs: 2180-2204. In some embodiments, the at least one guide RNA has a crRNA sequence having at least 80% identity to a sequence selected from SEQ ID NOs: 2180-2204. In some embodiments, the at least one guide RNA has a crRNA sequence having at least 85% identity to a sequence selected from SEQ ID NOs: 2180-2204. In some embodiments, the at least one guide RNA has a crRNA sequence having at least 90% identity to a sequence selected from SEQ ID NOs: 2180-2204. In some embodiments, the at least one guide RNA has a crRNA sequence having at least 95% identity to a sequence selected from SEQ ID NOs: 2180-2204. In some embodiments, the at least one guide RNA has a crRNA sequence selected from SEQ ID NOs: 2180-2204. In some embodiments, the joint disease or condition is arthritis, e.g., osteoarthritis. In some embodiments, the administering includes intra-articular injection of the pharmaceutical composition into the joint of the subject.

[0436] In some embodiments, the present disclosure provides a pharmaceutical composition for the treatment or prevention of a joint disease or condition, the composition including a therapeutically effective amount of one or more nucleic acids encoding a Clustered Regularly Interspaced Short Palindromic Repeats (CRISPR) gene-editing system. The system includes a CRISPR Associated Protein 9 (Cas9) protein, and at least one guide RNA targeting an SDHA gene, wherein the target sequence is adjacent to a protospacer adjacent motif (PAM) sequence for the Cas9 protein. In some embodiments, the at least one guide RNA includes a crRNA sequence that is complementary to a target sequence in any one of exons of the SDHA gene. In some embodiments, the at least one guide RNA includes a crRNA sequence that is complementary to a target sequence in one of exons disclosed herein of the SDHA gene. In some embodiments, the at least one guide RNA has a crRNA sequence having at least 75% identity to a sequence selected from SEQ ID NOs: 2205-2229. In some embodiments, the at least one guide RNA has a crRNA sequence having at least 80% identity to a sequence selected from SEQ ID NOs: 2205-2229. In some embodiments, the at least one guide RNA has a crRNA sequence having at least 85% identity to a sequence selected from SEQ ID NOs: 2205-2229. In some embodiments, the at least one guide RNA has a crRNA sequence having at least 90% identity to a sequence selected from SEQ ID NOs: 2205-2229. In some embodiments, the at least one guide RNA has a crRNA sequence having at least 95% identity to a sequence selected from SEQ ID NOs: 2205-2229. In some embodiments, the at least one guide RNA has a crRNA sequence selected from SEQ ID NOs: 2205-2229.

[0437] In some embodiments, the present disclosure provides method for the treatment or prevention of a joint disease or condition in a subject in need thereof. The method includes administering, to a joint of the subject, a pharmaceutical composition including a pharmaceutically effective amount of a composition having one or more nucleic acids encoding a Clustered Regularly Interspaced Short Palindromic Repeats (CRISPR) gene-editing system. The system includes a CRISPR Associated Protein 9 (Cas9) protein, and at least one guide RNA targeting an SDHA gene, wherein the target sequence is adjacent to a protospacer adjacent motif (PAM) sequence for the Cas9 protein. In some embodiments, the at least one guide RNA includes a crRNA sequence that is complementary to a target sequence in any one of exons of the SDHA gene. In some embodiments, the at least one guide RNA includes a crRNA sequence that is complementary to a target sequence in one of exons disclosed herein of the SDHA gene. In some embodiments, the at least one guide RNA has a crRNA sequence having at least 75% identity to a sequence selected from SEQ ID NOs: 2205-2229. In some embodiments, the at least one guide RNA has a crRNA sequence having at least 80% identity to a sequence selected from SEQ ID NOs: 2205-2229. In some embodiments, the at least one guide RNA has a crRNA sequence having at least 85% identity to a sequence selected from SEQ ID NOs: 2205-2229. In some embodiments, the at least one guide RNA has a crRNA sequence having at least 90% identity to a sequence selected from SEQ ID NOs: 2205-2229. In some embodiments, the at least one guide RNA has a crRNA sequence having at least 95% identity to a sequence selected from SEQ ID NOs: 2205-2229. In some embodiments, the at least one guide RNA has a crRNA sequence selected from SEQ ID NOs: 2205-2229. In some embodiments, the joint disease or condition is arthritis, e.g., osteoarthritis. In some embodiments, the administering includes intra-articular injection of the pharmaceutical composition into the joint of the subject.

[0438] In some embodiments, the present disclosure provides a pharmaceutical composition for the treatment or prevention of a joint disease or condition, the composition including a therapeutically effective amount of one or more nucleic acids encoding a Clustered Regularly Interspaced Short Palindromic Repeats (CRISPR) gene-editing system. The system includes a CRISPR Associated Protein 9 (Cas9) protein, and at least one guide RNA targeting an SDHB gene, wherein the target sequence is adjacent to a protospacer adjacent motif (PAM) sequence for the Cas9 protein. In some embodiments, the at least one guide RNA includes a crRNA sequence that is complementary to a target sequence in any one of exons of the SDHB gene. In some embodiments, the at least one guide RNA includes a crRNA sequence that is complementary to a target sequence in one of exons disclosed herein of the SDHB gene. In some embodiments, the at least one guide RNA has a crRNA sequence having at least 75% identity to a sequence selected from SEQ ID NOs: 2230-2254. In some embodiments, the at least one guide RNA has a crRNA sequence having at least 80% identity to a sequence selected from SEQ ID NOs: 2230-2254. In some embodiments, the at least one guide RNA has a crRNA sequence having at least 85% identity to a sequence selected from SEQ ID NOs: 2230-2254. In some embodiments, the at least one guide RNA has a crRNA sequence having at least 90% identity to a sequence selected from SEQ ID NOs: 2230-2254. In some embodiments, the at least one guide RNA has a crRNA sequence having at least 95% identity to a sequence selected from SEQ ID NOs: 2230-2254. In some embodiments, the at least one guide RNA has a crRNA sequence selected from SEQ ID NOs: 2230-2254.

[0439] In some embodiments, the present disclosure provides method for the treatment or prevention of a joint disease or condition in a subject in need thereof. The method includes administering, to a joint of the subject, a pharmaceutical composition including a pharmaceutically effective amount of a composition having one or more nucleic acids encoding a Clustered Regularly Interspaced Short Palindromic Repeats (CRISPR) gene-editing system. The system includes a CRISPR Associated Protein 9 (Cas9) protein, and at least one guide RNA targeting an SDHB gene, wherein the target sequence is adjacent to a protospacer adjacent motif (PAM) sequence for the Cas9 protein. In some embodiments, the at least one guide RNA includes a crRNA sequence that is complementary to a target sequence in any one of exons of the SDHB gene. In some embodiments, the at least one guide RNA includes a crRNA sequence that is complementary to a target sequence in one of exons disclosed herein of the SDHB gene. In some embodiments, the at least one guide RNA has a crRNA sequence having at least 75% identity to a sequence selected from SEQ ID NOs: 2230-2254. In some embodiments, the at least one guide RNA has a crRNA sequence having at least 80% identity to a sequence selected from SEQ ID NOs: 2230-2254. In some embodiments, the at least one guide RNA has a crRNA sequence having at least 85% identity to a sequence selected from SEQ ID NOs: 2230-2254. In some embodiments, the at least one guide RNA has a crRNA sequence having at least 90% identity to a sequence selected from SEQ ID NOs: 2230-2254. In some embodiments, the at least one guide RNA has a crRNA sequence having at least 95% identity to a sequence selected from SEQ ID NOs: 2230-2254. In some embodiments, the at least one guide RNA has a crRNA sequence selected from SEQ ID NOs: 2230-2254. In some embodiments, the joint disease or condition is arthritis, e.g., osteoarthritis. In some embodiments, the administering includes intra-articular injection of the pharmaceutical composition into the joint of the subject.

[0440] In some embodiments, the present disclosure provides a pharmaceutical composition for the treatment or prevention of a joint disease or condition, the composition including a therapeutically effective amount of one or more nucleic acids encoding a Clustered Regularly Interspaced Short Palindromic Repeats (CRISPR) gene-editing system. The system includes a CRISPR Associated Protein 9 (Cas9) protein, and at least one guide RNA targeting an SDHC gene, wherein the target sequence is adjacent to a protospacer adjacent motif (PAM) sequence for the Cas9 protein. In some embodiments, the at least one guide RNA includes a crRNA sequence that is complementary to a target sequence in any one of exons of the SDHC gene. In some embodiments, the at least one guide RNA includes a crRNA sequence that is complementary to a target sequence in one of exons disclosed herein of the SDHC gene. In some embodiments, the at least one guide RNA has a crRNA sequence having at least 75% identity to a sequence selected from SEQ ID NOs: 2255-2279. In some embodiments, the at least one guide RNA has a crRNA sequence having at least 80% identity to a sequence selected from SEQ ID NOs: 2255-2279. In some embodiments, the at least one guide RNA has a crRNA sequence having at least 85% identity to a sequence selected from SEQ ID NOs: 2255-2279. In some embodiments, the at least one guide RNA has a crRNA sequence having at least 90% identity to a sequence selected from SEQ ID NOs: 2255-2279. In some embodiments, the at least one guide RNA has a crRNA sequence having at least 95% identity to a sequence selected from SEQ ID NOs: 2255-2279. In some embodiments, the at least one guide RNA has a crRNA sequence selected from SEQ ID NOs: 2255-2279.

[0441] In some embodiments, the present disclosure provides method for the treatment or prevention of a joint disease or condition in a subject in need thereof. The method includes administering, to a joint of the subject, a pharmaceutical composition including a pharmaceutically effective amount of a composition having one or more nucleic acids encoding a Clustered Regularly Interspaced Short Palindromic Repeats (CRISPR) gene-editing system. The system includes a CRISPR Associated Protein 9 (Cas9) protein, and at least one guide RNA targeting an SDHC gene, wherein the target sequence is adjacent to a protospacer adjacent motif (PAM) sequence for the Cas9 protein. In some embodiments, the at least one guide RNA includes a crRNA sequence that is complementary to a target sequence in any one of exons of the SDHC gene. In some embodiments, the at least one guide RNA includes a crRNA sequence that is complementary to a target sequence in one of exons disclosed herein of the SDHC gene. In some embodiments, the at least one guide RNA has a crRNA sequence having at least 75% identity to a sequence selected from SEQ ID NOs: 2255-2279. In some embodiments, the at least one guide RNA has a crRNA sequence having at least 80% identity to a sequence selected from SEQ ID NOs: 2255-2279. In some embodiments, the at least one guide RNA has a crRNA sequence having at least 85% identity to a sequence selected from SEQ ID NOs: 2255-2279. In some embodiments, the at least one guide RNA has a crRNA sequence having at least 90% identity to a sequence selected from SEQ ID NOs: 2255-2279. In some embodiments, the at least one guide RNA has a crRNA sequence having at least 95% identity to a sequence selected from SEQ ID NOs: 2255-2279. In some embodiments, the at least one guide RNA has a crRNA sequence selected from SEQ ID NOs: 2255-2279. In some embodiments, the joint disease or condition is arthritis, e.g., osteoarthritis. In some embodiments, the administering includes intra-articular injection of the pharmaceutical composition into the joint of the subject.

[0442] In some embodiments, the present disclosure provides a pharmaceutical composition for the treatment or prevention of a joint disease or condition, the composition including a therapeutically effective amount of one or more nucleic acids encoding a Clustered Regularly Interspaced Short Palindromic Repeats (CRISPR) gene-editing system. The system includes a CRISPR Associated Protein 9 (Cas9) protein, and at least one guide RNA targeting an SDHD gene, wherein the target sequence is adjacent to a protospacer adjacent motif (PAM) sequence for the Cas9 protein. In some embodiments, the at least one guide RNA includes a crRNA sequence that is complementary to a target sequence in any one of exons of the SDHD gene. In some embodiments, the at least one guide RNA includes a crRNA sequence that is complementary to a target sequence in one of exons disclosed herein of the SDHD gene. In some embodiments, the at least one guide RNA has a crRNA sequence having at least 75% identity to a sequence selected from SEQ ID NOs: 2280-2304. In some embodiments, the at least one guide RNA has a crRNA sequence having at least 80% identity to a sequence selected from SEQ ID NOs: 2280-2304. In some embodiments, the at least one guide RNA has a crRNA sequence having at least 85% identity to a sequence selected from SEQ ID NOs: 2280-2304. In some embodiments, the at least one guide RNA has a crRNA sequence having at least 90% identity to a sequence selected from SEQ ID NOs: 2280-2304. In some embodiments, the at least one guide RNA has a crRNA sequence having at least 95% identity to a sequence selected from SEQ ID NOs: 2280-2304. In some embodiments, the at least one guide RNA has a crRNA sequence selected from SEQ ID NOs: 2280-2304.

[0443] In some embodiments, the present disclosure provides method for the treatment or prevention of a joint disease or condition in a subject in need thereof. The method includes administering, to a joint of the subject, a pharmaceutical composition including a pharmaceutically effective amount of a composition having one or more nucleic acids encoding a Clustered Regularly Interspaced Short Palindromic Repeats (CRISPR) gene-editing system. The system includes a CRISPR Associated Protein 9 (Cas9) protein, and at least one guide RNA targeting an SDHD gene, wherein the target sequence is adjacent to a protospacer adjacent motif (PAM) sequence for the Cas9 protein. In some embodiments, the at least one guide RNA includes a crRNA sequence that is complementary to a target sequence in any one of exons of the SDHD gene. In some embodiments, the at least one guide RNA includes a crRNA sequence that is complementary to a target sequence in one of exons disclosed herein of the SDHD gene. In some embodiments, the at least one guide RNA has a crRNA sequence having at least 75% identity to a sequence selected from SEQ ID NOs: 2280-2304. In some embodiments, the at least one guide RNA has a crRNA sequence having at least 80% identity to a sequence selected from SEQ ID NOs: 2280-2304. In some embodiments, the at least one guide RNA has a crRNA sequence having at least 85% identity to a sequence selected from SEQ ID NOs: 2280-2304. In some embodiments, the at least one guide RNA has a crRNA sequence having at least 90% identity to a sequence selected from SEQ ID NOs: 2280-2304. In some embodiments, the at least one guide RNA has a crRNA sequence having at least 95% identity to a sequence selected from SEQ ID NOs: 2280-2304. In some embodiments, the at least one guide RNA has a crRNA sequence selected from SEQ ID NOs: 2280-2304. In some embodiments, the joint disease or condition is arthritis, e.g., osteoarthritis. In some embodiments, the administering includes intra-articular injection of the pharmaceutical composition into the joint of the subject.

[0444] In some embodiments, the present disclosure provides a pharmaceutical composition for the treatment or prevention of a joint disease or condition, the composition including a therapeutically effective amount of one or more nucleic acids encoding a Clustered Regularly Interspaced Short Palindromic Repeats (CRISPR) gene-editing system. The system includes a CRISPR Associated Protein 9 (Cas9) protein, and at least one guide RNA targeting an CYC1 gene, wherein the target sequence is adjacent to a protospacer adjacent motif (PAM) sequence for the Cas9 protein. In some embodiments, the at least one guide RNA includes a crRNA sequence that is complementary to a target sequence in any one of exons of the CYC1 gene. In some embodiments, the at least one guide RNA includes a crRNA sequence that is complementary to a target sequence in one of exons disclosed herein of the CYC1 gene. In some embodiments, the at least one guide RNA has a crRNA sequence having at least 75% identity to a sequence selected from SEQ ID NOs: 2305-2329. In some embodiments, the at least one guide RNA has a crRNA sequence having at least 80% identity to a sequence selected from SEQ ID NOs: 2305-2329. In some embodiments, the at least one guide RNA has a crRNA sequence having at least 85% identity to a sequence selected from SEQ ID NOs: 2305-2329. In some embodiments, the at least one guide RNA has a crRNA sequence having at least 90% identity to a sequence selected from SEQ ID NOs: 2305-2329. In some embodiments, the at least one guide RNA has a crRNA sequence having at least 95% identity to a sequence selected from SEQ ID NOs: 2305-2329. In some embodiments, the at least one guide RNA has a crRNA sequence selected from SEQ ID NOs: 2305-2329.

[0445] In some embodiments, the present disclosure provides method for the treatment or prevention of a joint disease or condition in a subject in need thereof. The method includes administering, to a joint of the subject, a pharmaceutical composition including a pharmaceutically effective amount of a composition having one or more nucleic acids encoding a Clustered Regularly Interspaced Short Palindromic Repeats (CRISPR) gene-editing system. The system includes a CRISPR Associated Protein 9 (Cas9) protein, and at least one guide RNA targeting an CYC1 gene, wherein the target sequence is adjacent to a protospacer adjacent motif (PAM) sequence for the Cas9 protein. In some embodiments, the at least one guide RNA includes a crRNA sequence that is complementary to a target sequence in any one of exons of the CYC1 gene. In some embodiments, the at least one guide RNA includes a crRNA sequence that is complementary to a target sequence in one of exons disclosed herein of the CYC1 gene. In some embodiments, the at least one guide RNA has a crRNA sequence having at least 75% identity to a sequence selected from SEQ ID NOs: 2305-2329. In some embodiments, the at least one guide RNA has a crRNA sequence having at least 80% identity to a sequence selected from SEQ ID NOs: 2305-2329. In some embodiments, the at least one guide RNA has a crRNA sequence having at least 85% identity to a sequence selected from SEQ ID NOs: 2305-2329. In some embodiments, the at least one guide RNA has a crRNA sequence having at least 90% identity to a sequence selected from SEQ ID NOs: 2305-2329. In some embodiments, the at least one guide RNA has a crRNA sequence having at least 95% identity to a sequence selected from SEQ ID NOs: 2305-2329. In some embodiments, the at least one guide RNA has a crRNA sequence selected from SEQ ID NOs: 2305-2329. In some embodiments, the joint disease or condition is arthritis, e.g., osteoarthritis. In some embodiments, the administering includes intra-articular injection of the pharmaceutical composition into the joint of the subject.

[0446] In some embodiments, the present disclosure provides a pharmaceutical composition for the treatment or prevention of a joint disease or condition, the composition including a therapeutically effective amount of one or more nucleic acids encoding a Clustered Regularly Interspaced Short Palindromic Repeats (CRISPR) gene-editing system. The system includes a CRISPR Associated Protein 9 (Cas9) protein, and at least one guide RNA targeting an COX1 gene, wherein the target sequence is adjacent to a protospacer adjacent motif (PAM) sequence for the Cas9 protein. In some embodiments, the at least one guide RNA includes a crRNA sequence that is complementary to a target sequence in any one of exons of the COX1 gene. In some embodiments, the at least one guide RNA includes a crRNA sequence that is complementary to a target sequence in one of exons disclosed herein of the COX1 gene. In some embodiments, the at least one guide RNA has a crRNA sequence having at least 75% identity to a sequence selected from SEQ ID NOs: 2330-2354. In some embodiments, the at least one guide RNA has a crRNA sequence having at least 80% identity to a sequence selected from SEQ ID NOs: 2330-2354. In some embodiments, the at least one guide RNA has a crRNA sequence having at least 85% identity to a sequence selected from SEQ ID NOs: 2330-2354. In some embodiments, the at least one guide RNA has a crRNA sequence having at least 90% identity to a sequence selected from SEQ ID NOs: 2330-2354. In some embodiments, the at least one guide RNA has a crRNA sequence having at least 95% identity to a sequence selected from SEQ ID NOs: 2330-2354. In some embodiments, the at least one guide RNA has a crRNA sequence selected from SEQ ID NOs: 2330-2354.

[0447] In some embodiments, the present disclosure provides method for the treatment or prevention of a joint disease or condition in a subject in need thereof. The method includes administering, to a joint of the subject, a pharmaceutical composition including a pharmaceutically effective amount of a composition having one or more nucleic acids encoding a Clustered Regularly Interspaced Short Palindromic Repeats (CRISPR) gene-editing system. The system includes a CRISPR Associated Protein 9 (Cas9) protein, and at least one guide RNA targeting an COX1 gene, wherein the target sequence is adjacent to a protospacer adjacent motif (PAM) sequence for the Cas9 protein. In some embodiments, the at least one guide RNA includes a crRNA sequence that is complementary to a target sequence in any one of exons of the COX1 gene. In some embodiments, the at least one guide RNA includes a crRNA sequence that is complementary to a target sequence in one of exons disclosed herein of the COX1 gene. In some embodiments, the at least one guide RNA has a crRNA sequence having at least 75% identity to a sequence selected from SEQ ID NOs: 2330-2354. In some embodiments, the at least one guide RNA has a crRNA sequence having at least 80% identity to a sequence selected from SEQ ID NOs: 2330-2354. In some embodiments, the at least one guide RNA has a crRNA sequence having at least 85% identity to a sequence selected from SEQ ID NOs: 2330-2354. In some embodiments, the at least one guide RNA has a crRNA sequence having at least 90% identity to a sequence selected from SEQ ID NOs: 2330-2354. In some embodiments, the at least one guide RNA has a crRNA sequence having at least 95% identity to a sequence selected from SEQ ID NOs: 2330-2354. In some embodiments, the at least one guide RNA has a crRNA sequence selected from SEQ ID NOs: 2330-2354. In some embodiments, the joint disease or condition is arthritis, e.g., osteoarthritis. In some embodiments, the administering includes intra-articular injection of the pharmaceutical composition into the joint of the subject.

[0448] In some embodiments, the present disclosure provides a pharmaceutical composition for the treatment or prevention of a joint disease or condition, the composition including a therapeutically effective amount of one or more nucleic acids encoding a Clustered Regularly Interspaced Short Palindromic Repeats (CRISPR) gene-editing system. The system includes a CRISPR Associated Protein 9 (Cas9) protein, and at least one guide RNA targeting an SESN1 gene, wherein the target sequence is adjacent to a protospacer adjacent motif (PAM) sequence for the Cas9 protein. In some embodiments, the at least one guide RNA includes a crRNA sequence that is complementary to a target sequence in any one of exons of the SESN1 gene. In some embodiments, the at least one guide RNA includes a crRNA sequence that is complementary to a target sequence in one of exons disclosed herein of the SESN1 gene. In some embodiments, the at least one guide RNA has a crRNA sequence having at least 75% identity to a sequence selected from SEQ ID NOs: 2355-2379. In some embodiments, the at least one guide RNA has a crRNA sequence having at least 80% identity to a sequence selected from SEQ ID NOs: 2355-2379. In some embodiments, the at least one guide RNA has a crRNA sequence having at least 85% identity to a sequence selected from SEQ ID NOs: 2355-2379. In some embodiments, the at least one guide RNA has a crRNA sequence having at least 90% identity to a sequence selected from SEQ ID NOs: 2355-2379. In some embodiments, the at least one guide RNA has a crRNA sequence having at least 95% identity to a sequence selected from SEQ ID NOs: 2355-2379. In some embodiments, the at least one guide RNA has a crRNA sequence selected from SEQ ID NOs: 2355-2379.

[0449] In some embodiments, the present disclosure provides method for the treatment or prevention of a joint disease or condition in a subject in need thereof. The method includes administering, to a joint of the subject, a pharmaceutical composition including a pharmaceutically effective amount of a composition having one or more nucleic acids encoding a Clustered Regularly Interspaced Short Palindromic Repeats (CRISPR) gene-editing system. The system includes a CRISPR Associated Protein 9 (Cas9) protein, and at least one guide RNA targeting an SESN1 gene, wherein the target sequence is adjacent to a protospacer adjacent motif (PAM) sequence for the Cas9 protein. In some embodiments, the at least one guide RNA includes a crRNA sequence that is complementary to a target sequence in any one of exons of the SESN1 gene. In some embodiments, the at least one guide RNA includes a crRNA sequence that is complementary to a target sequence in one of exons disclosed herein of the SESN1 gene. In some embodiments, the at least one guide RNA has a crRNA sequence having at least 75% identity to a sequence selected from SEQ ID NOs: 2355-2379. In some embodiments, the at least one guide RNA has a crRNA sequence having at least 80% identity to a sequence selected from SEQ ID NOs: 2355-2379. In some embodiments, the at least one guide RNA has a crRNA sequence having at least 85% identity to a sequence selected from SEQ ID NOs: 2355-2379. In some embodiments, the at least one guide RNA has a crRNA sequence having at least 90% identity to a sequence selected from SEQ ID NOs: 2355-2379. In some embodiments, the at least one guide RNA has a crRNA sequence having at least 95% identity to a sequence selected from SEQ ID NOs: 2355-2379. In some embodiments, the at least one guide RNA has a crRNA sequence selected from SEQ ID NOs: 2355-2379. In some embodiments, the joint disease or condition is arthritis, e.g., osteoarthritis. In some embodiments, the administering includes intra-articular injection of the pharmaceutical composition into the joint of the subject.

[0450] In some embodiments, the present disclosure provides a pharmaceutical composition for the treatment or prevention of a joint disease or condition, the composition including a therapeutically effective amount of one or more nucleic acids encoding a Clustered Regularly Interspaced Short Palindromic Repeats (CRISPR) gene-editing system. The system includes a CRISPR Associated Protein 9 (Cas9) protein, and at least one guide RNA targeting an SESN2 gene, wherein the target sequence is adjacent to a protospacer adjacent motif (PAM) sequence for the Cas9 protein. In some embodiments, the at least one guide RNA includes a crRNA sequence that is complementary to a target sequence in any one of exons of the SESN2 gene. In some embodiments, the at least one guide RNA includes a crRNA sequence that is complementary to a target sequence in one of exons disclosed herein of the SESN2 gene. In some embodiments, the at least one guide RNA has a crRNA sequence having at least 75% identity to a sequence selected from SEQ ID NOs: 2380-2404. In some embodiments, the at least one guide RNA has a crRNA sequence having at least 80% identity to a sequence selected from SEQ ID NOs: 2380-2404. In some embodiments, the at least one guide RNA has a crRNA sequence having at least 85% identity to a sequence selected from SEQ ID NOs: 2380-2404. In some embodiments, the at least one guide RNA has a crRNA sequence having at least 90% identity to a sequence selected from SEQ ID NOs: 2380-2404. In some embodiments, the at least one guide RNA has a crRNA sequence having at least 95% identity to a sequence selected from SEQ ID NOs: 2380-2404. In some embodiments, the at least one guide RNA has a crRNA sequence selected from SEQ ID NOs: 2380-2404.

[0451] In some embodiments, the present disclosure provides method for the treatment or prevention of a joint disease or condition in a subject in need thereof. The method includes administering, to a joint of the subject, a pharmaceutical composition including a pharmaceutically effective amount of a composition having one or more nucleic acids encoding a Clustered Regularly Interspaced Short Palindromic Repeats (CRISPR) gene-editing system. The system includes a CRISPR Associated Protein 9 (Cas9) protein, and at least one guide RNA targeting an SESN2 gene, wherein the target sequence is adjacent to a protospacer adjacent motif (PAM) sequence for the Cas9 protein. In some embodiments, the at least one guide RNA includes a crRNA sequence that is complementary to a target sequence in any one of exons of the SESN2 gene. In some embodiments, the at least one guide RNA includes a crRNA sequence that is complementary to a target sequence in one of exons disclosed herein of the SESN2 gene. In some embodiments, the at least one guide RNA has a crRNA sequence having at least 75% identity to a sequence selected from SEQ ID NOs: 2380-2404. In some embodiments, the at least one guide RNA has a crRNA sequence having at least 80% identity to a sequence selected from SEQ ID NOs: 2380-2404. In some embodiments, the at least one guide RNA has a crRNA sequence having at least 85% identity to a sequence selected from SEQ ID NOs: 2380-2404. In some embodiments, the at least one guide RNA has a crRNA sequence having at least 90% identity to a sequence selected from SEQ ID NOs: 2380-2404. In some embodiments, the at least one guide RNA has a crRNA sequence having at least 95% identity to a sequence selected from SEQ ID NOs: 2380-2404. In some embodiments, the at least one guide RNA has a crRNA sequence selected from SEQ ID NOs: 2380-2404. In some embodiments, the joint disease or condition is arthritis, e.g., osteoarthritis. In some embodiments, the administering includes intra-articular injection of the pharmaceutical composition into the joint of the subject.

[0452] In some embodiments, the present disclosure provides a pharmaceutical composition for the treatment or prevention of a joint disease or condition, the composition including a therapeutically effective amount of one or more nucleic acids encoding a Clustered Regularly Interspaced Short Palindromic Repeats (CRISPR) gene-editing system. The system includes a CRISPR Associated Protein 9 (Cas9) protein, and at least one guide RNA targeting an SOD1 gene, wherein the target sequence is adjacent to a protospacer adjacent motif (PAM) sequence for the Cas9 protein. In some embodiments, the at least one guide RNA includes a crRNA sequence that is complementary to a target sequence in any one of exons of the SOD1 gene. In some embodiments, the at least one guide RNA includes a crRNA sequence that is complementary to a target sequence in one of exons disclosed herein of the SOD1 gene. In some embodiments, the at least one guide RNA has a crRNA sequence having at least 75% identity to a sequence selected from SEQ ID NOs: 2405-2429. In some embodiments, the at least one guide RNA has a crRNA sequence having at least 80% identity to a sequence selected from SEQ ID NOs: 2405-2429. In some embodiments, the at least one guide RNA has a crRNA sequence having at least 85% identity to a sequence selected from SEQ ID NOs: 2405-2429. In some embodiments, the at least one guide RNA has a crRNA sequence having at least 90% identity to a sequence selected from SEQ ID NOs: 2405-2429. In some embodiments, the at least one guide RNA has a crRNA sequence having at least 95% identity to a sequence selected from SEQ ID NOs: 2405-2429. In some embodiments, the at least one guide RNA has a crRNA sequence selected from SEQ ID NOs: 2405-2429.

[0453] In some embodiments, the present disclosure provides method for the treatment or prevention of a joint disease or condition in a subject in need thereof. The method includes administering, to a joint of the subject, a pharmaceutical composition including a pharmaceutically effective amount of a composition having one or more nucleic acids encoding a Clustered Regularly Interspaced Short Palindromic Repeats (CRISPR) gene-editing system. The system includes a CRISPR Associated Protein 9 (Cas9) protein, and at least one guide RNA targeting an SOD1 gene, wherein the target sequence is adjacent to a protospacer adjacent motif (PAM) sequence for the Cas9 protein. In some embodiments, the at least one guide RNA includes a crRNA sequence that is complementary to a target sequence in any one of exons of the SOD1 gene. In some embodiments, the at least one guide RNA includes a crRNA sequence that is complementary to a target sequence in one of exons disclosed herein of the SOD1 gene. In some embodiments, the at least one guide RNA has a crRNA sequence having at least 75% identity to a sequence selected from SEQ ID NOs: 2405-2429. In some embodiments, the at least one guide RNA has a crRNA sequence having at least 80% identity to a sequence selected from SEQ ID NOs: 2405-2429. In some embodiments, the at least one guide RNA has a crRNA sequence having at least 85% identity to a sequence selected from SEQ ID NOs: 2405-2429. In some embodiments, the at least one guide RNA has a crRNA sequence having at least 90% identity to a sequence selected from SEQ ID NOs: 2405-2429. In some embodiments, the at least one guide RNA has a crRNA sequence having at least 95% identity to a sequence selected from SEQ ID NOs: 2405-2429. In some embodiments, the at least one guide RNA has a crRNA sequence selected from SEQ ID NOs: 2405-2429. In some embodiments, the joint disease or condition is arthritis, e.g., osteoarthritis. In some embodiments, the administering includes intra-articular injection of the pharmaceutical composition into the joint of the subject.

[0454] In some embodiments, the present disclosure provides a pharmaceutical composition for the treatment or prevention of a joint disease or condition, the composition including a therapeutically effective amount of one or more nucleic acids encoding a Clustered Regularly Interspaced Short Palindromic Repeats (CRISPR) gene-editing system. The system includes a CRISPR Associated Protein 9 (Cas9) protein, and at least one guide RNA targeting an SOD2 gene, wherein the target sequence is adjacent to a protospacer adjacent motif (PAM) sequence for the Cas9 protein. In some embodiments, the at least one guide RNA includes a crRNA sequence that is complementary to a target sequence in any one of exons of the SOD2 gene. In some embodiments, the at least one guide RNA includes a crRNA sequence that is complementary to a target sequence in one of exons disclosed herein of the SOD2 gene. In some embodiments, the at least one guide RNA has a crRNA sequence having at least 75% identity to a sequence selected from SEQ ID NOs: 2430-2454. In some embodiments, the at least one guide RNA has a crRNA sequence having at least 80% identity to a sequence selected from SEQ ID NOs: 2430-2454. In some embodiments, the at least one guide RNA has a crRNA sequence having at least 85% identity to a sequence selected from SEQ ID NOs: 2430-2454. In some embodiments, the at least one guide RNA has a crRNA sequence having at least 90% identity to a sequence selected from SEQ ID NOs: 2430-2454. In some embodiments, the at least one guide RNA has a crRNA sequence having at least 95% identity to a sequence selected from SEQ ID NOs: 2430-2454. In some embodiments, the at least one guide RNA has a crRNA sequence selected from SEQ ID NOs: 2430-2454.

[0455] In some embodiments, the present disclosure provides method for the treatment or prevention of a joint disease or condition in a subject in need thereof. The method includes administering, to a joint of the subject, a pharmaceutical composition including a pharmaceutically effective amount of a composition having one or more nucleic acids encoding a Clustered Regularly Interspaced Short Palindromic Repeats (CRISPR) gene-editing system. The system includes a CRISPR Associated Protein 9 (Cas9) protein, and at least one guide RNA targeting an SOD2 gene, wherein the target sequence is adjacent to a protospacer adjacent motif (PAM) sequence for the Cas9 protein. In some embodiments, the at least one guide RNA includes a crRNA sequence that is complementary to a target sequence in any one of exons of the SOD2 gene. In some embodiments, the at least one guide RNA includes a crRNA sequence that is complementary to a target sequence in one of exons disclosed herein of the SOD2 gene. In some embodiments, the at least one guide RNA has a crRNA sequence having at least 75% identity to a sequence selected from SEQ ID NOs: 2430-2454. In some embodiments, the at least one guide RNA has a crRNA sequence having at least 80% identity to a sequence selected from SEQ ID NOs: 2430-2454. In some embodiments, the at least one guide RNA has a crRNA sequence having at least 85% identity to a sequence selected from SEQ ID NOs: 2430-2454. In some embodiments, the at least one guide RNA has a crRNA sequence having at least 90% identity to a sequence selected from SEQ ID NOs: 2430-2454. In some embodiments, the at least one guide RNA has a crRNA sequence having at least 95% identity to a sequence selected from SEQ ID NOs: 2430-2454. In some embodiments, the at least one guide RNA has a crRNA sequence selected from SEQ ID NOs: 2430-2454. In some embodiments, the joint disease or condition is arthritis, e.g., osteoarthritis. In some embodiments, the administering includes intra-articular injection of the pharmaceutical composition into the joint of the subject.

[0456] In some embodiments, the present disclosure provides a pharmaceutical composition for the treatment or prevention of a joint disease or condition, the composition including a therapeutically effective amount of one or more nucleic acids encoding a Clustered Regularly Interspaced Short Palindromic Repeats (CRISPR) gene-editing system. The system includes a CRISPR Associated Protein 9 (Cas9) protein, and at least one guide RNA targeting an SOD3 gene, wherein the target sequence is adjacent to a protospacer adjacent motif (PAM) sequence for the Cas9 protein. In some embodiments, the at least one guide RNA includes a crRNA sequence that is complementary to a target sequence in any one of exons of the SOD3 gene. In some embodiments, the at least one guide RNA includes a crRNA sequence that is complementary to a target sequence in one of exons disclosed herein of the SOD3 gene. In some embodiments, the at least one guide RNA has a crRNA sequence having at least 75% identity to a sequence selected from SEQ ID NOs: 2455-2479. In some embodiments, the at least one guide RNA has a crRNA sequence having at least 80% identity to a sequence selected from SEQ ID NOs: 2455-2479. In some embodiments, the at least one guide RNA has a crRNA sequence having at least 85% identity to a sequence selected from SEQ ID NOs: 2455-2479. In some embodiments, the at least one guide RNA has a crRNA sequence having at least 90% identity to a sequence selected from SEQ ID NOs: 2455-2479. In some embodiments, the at least one guide RNA has a crRNA sequence having at least 95% identity to a sequence selected from SEQ ID NOs: 2455-2479. In some embodiments, the at least one guide RNA has a crRNA sequence selected from SEQ ID NOs: 2455-2479.

[0457] In some embodiments, the present disclosure provides method for the treatment or prevention of a joint disease or condition in a subject in need thereof. The method includes administering, to a joint of the subject, a pharmaceutical composition including a pharmaceutically effective amount of a composition having one or more nucleic acids encoding a Clustered Regularly Interspaced Short Palindromic Repeats (CRISPR) gene-editing system. The system includes a CRISPR Associated Protein 9 (Cas9) protein, and at least one guide RNA targeting an SOD3 gene, wherein the target sequence is adjacent to a protospacer adjacent motif (PAM) sequence for the Cas9 protein. In some embodiments, the at least one guide RNA includes a crRNA sequence that is complementary to a target sequence in any one of exons of the SOD3 gene. In some embodiments, the at least one guide RNA includes a crRNA sequence that is complementary to a target sequence in one of exons disclosed herein of the SOD3 gene. In some embodiments, the at least one guide RNA has a crRNA sequence having at least 75% identity to a sequence selected from SEQ ID NOs: 2455-2479. In some embodiments, the at least one guide RNA has a crRNA sequence having at least 80% identity to a sequence selected from SEQ ID NOs: 2455-2479. In some embodiments, the at least one guide RNA has a crRNA sequence having at least 85% identity to a sequence selected from SEQ ID NOs: 2455-2479. In some embodiments, the at least one guide RNA has a crRNA sequence having at least 90% identity to a sequence selected from SEQ ID NOs: 2455-2479. In some embodiments, the at least one guide RNA has a crRNA sequence having at least 95% identity to a sequence selected from SEQ ID NOs: 2455-2479. In some embodiments, the at least one guide RNA has a crRNA sequence selected from SEQ ID NOs: 2455-2479. In some embodiments, the joint disease or condition is arthritis, e.g., osteoarthritis. In some embodiments, the administering includes intra-articular injection of the pharmaceutical composition into the joint of the subject.

[0458] In some embodiments, the present disclosure provides a pharmaceutical composition for the treatment or prevention of a joint disease or condition, the composition including a therapeutically effective amount of one or more nucleic acids encoding a Clustered Regularly Interspaced Short Palindromic Repeats (CRISPR) gene-editing system. The system includes a CRISPR Associated Protein 9 (Cas9) protein, and at least one guide RNA targeting an TNFAIP3 gene, wherein the target sequence is adjacent to a protospacer adjacent motif (PAM) sequence for the Cas9 protein. In some embodiments, the at least one guide RNA includes a crRNA sequence that is complementary to a target sequence in any one of exons of the TNFAIP3 gene. In some embodiments, the at least one guide RNA includes a crRNA sequence that is complementary to a target sequence in one of exons disclosed herein of the TNFAIP3 gene. In some embodiments, the at least one guide RNA has a crRNA sequence having at least 75% identity to a sequence selected from SEQ ID NOs: 2480-2504. In some embodiments, the at least one guide RNA has a crRNA sequence having at least 80% identity to a sequence selected from SEQ ID NOs: 2480-2504. In some embodiments, the at least one guide RNA has a crRNA sequence having at least 85% identity to a sequence selected from SEQ ID NOs: 2480-2504. In some embodiments, the at least one guide RNA has a crRNA sequence having at least 90% identity to a sequence selected from SEQ ID NOs: 2480-2504. In some embodiments, the at least one guide RNA has a crRNA sequence having at least 95% identity to a sequence selected from SEQ ID NOs: 2480-2504. In some embodiments, the at least one guide RNA has a crRNA sequence selected from SEQ ID NOs: 2480-2504.

[0459] In some embodiments, the present disclosure provides method for the treatment or prevention of a joint disease or condition in a subject in need thereof. The method includes administering, to a joint of the subject, a pharmaceutical composition including a pharmaceutically effective amount of a composition having one or more nucleic acids encoding a Clustered Regularly Interspaced Short Palindromic Repeats (CRISPR) gene-editing system. The system includes a CRISPR Associated Protein 9 (Cas9) protein, and at least one guide RNA targeting an TNFAIP3 gene, wherein the target sequence is adjacent to a protospacer adjacent motif (PAM) sequence for the Cas9 protein. In some embodiments, the at least one guide RNA includes a crRNA sequence that is complementary to a target sequence in any one of exons of the TNFAIP3 gene. In some embodiments, the at least one guide RNA includes a crRNA sequence that is complementary to a target sequence in one of exons disclosed herein of the TNFAIP3 gene. In some embodiments, the at least one guide RNA has a crRNA sequence having at least 75% identity to a sequence selected from SEQ ID NOs: 2480-2504. In some embodiments, the at least one guide RNA has a crRNA sequence having at least 80% identity to a sequence selected from SEQ ID NOs: 2480-2504. In some embodiments, the at least one guide RNA has a crRNA sequence having at least 85% identity to a sequence selected from SEQ ID NOs: 2480-2504. In some embodiments, the at least one guide RNA has a crRNA sequence having at least 90% identity to a sequence selected from SEQ ID NOs: 2480-2504. In some embodiments, the at least one guide RNA has a crRNA sequence having at least 95% identity to a sequence selected from SEQ ID NOs: 2480-2504. In some embodiments, the at least one guide RNA has a crRNA sequence selected from SEQ ID NOs: 2480-2504. In some embodiments, the joint disease or condition is arthritis, e.g., osteoarthritis. In some embodiments, the administering includes intra-articular injection of the pharmaceutical composition into the joint of the subject.

[0460] In some embodiments, the present disclosure provides a pharmaceutical composition for the treatment or prevention of a joint disease or condition, the composition including a therapeutically effective amount of one or more nucleic acids encoding a Clustered Regularly Interspaced Short Palindromic Repeats (CRISPR) gene-editing system. The system includes a CRISPR Associated Protein 9 (Cas9) protein, and at least one guide RNA targeting an TP53 gene, wherein the target sequence is adjacent to a protospacer adjacent motif (PAM) sequence for the Cas9 protein. In some embodiments, the at least one guide RNA includes a crRNA sequence that is complementary to a target sequence in any one of exons of the TP53 gene. In some embodiments, the at least one guide RNA includes a crRNA sequence that is complementary to a target sequence in one of exons disclosed herein of the TP53 gene. In some embodiments, the at least one guide RNA has a crRNA sequence having at least 75% identity to a sequence selected from SEQ ID NOs: 2505-2529. In some embodiments, the at least one guide RNA has a crRNA sequence having at least 80% identity to a sequence selected from SEQ ID NOs: 2505-2529. In some embodiments, the at least one guide RNA has a crRNA sequence having at least 85% identity to a sequence selected from SEQ ID NOs: 2505-2529. In some embodiments, the at least one guide RNA has a crRNA sequence having at least 90% identity to a sequence selected from SEQ ID NOs: 2505-2529. In some embodiments, the at least one guide RNA has a crRNA sequence having at least 95% identity to a sequence selected from SEQ ID NOs: 2505-2529. In some embodiments, the at least one guide RNA has a crRNA sequence selected from SEQ ID NOs: 2505-2529.

[0461] In some embodiments, the present disclosure provides method for the treatment or prevention of a joint disease or condition in a subject in need thereof. The method includes administering, to a joint of the subject, a pharmaceutical composition including a pharmaceutically effective amount of a composition having one or more nucleic acids encoding a Clustered Regularly Interspaced Short Palindromic Repeats (CRISPR) gene-editing system. The system includes a CRISPR Associated Protein 9 (Cas9) protein, and at least one guide RNA targeting an TP53 gene, wherein the target sequence is adjacent to a protospacer adjacent motif (PAM) sequence for the Cas9 protein. In some embodiments, the at least one guide RNA includes a crRNA sequence that is complementary to a target sequence in any one of exons of the TP53 gene. In some embodiments, the at least one guide RNA includes a crRNA sequence that is complementary to a target sequence in one of exons disclosed herein of the TP53 gene. In some embodiments, the at least one guide RNA has a crRNA sequence having at least 75% identity to a sequence selected from SEQ ID NOs: 2505-2529. In some embodiments, the at least one guide RNA has a crRNA sequence having at least 80% identity to a sequence selected from SEQ ID NOs: 2505-2529. In some embodiments, the at least one guide RNA has a crRNA sequence having at least 85% identity to a sequence selected from SEQ ID NOs: 2505-2529. In some embodiments, the at least one guide RNA has a crRNA sequence having at least 90% identity to a sequence selected from SEQ ID NOs: 2505-2529. In some embodiments, the at least one guide RNA has a crRNA sequence having at least 95% identity to a sequence selected from SEQ ID NOs: 2505-2529. In some embodiments, the at least one guide RNA has a crRNA sequence selected from SEQ ID NOs: 2505-2529. In some embodiments, the joint disease or condition is arthritis, e.g., osteoarthritis. In some embodiments, the administering includes intra-articular injection of the pharmaceutical composition into the joint of the subject.

[0462] In some embodiments, the present disclosure provides a pharmaceutical composition for the treatment or prevention of a joint disease or condition, the composition including a therapeutically effective amount of one or more nucleic acids encoding a Clustered Regularly Interspaced Short Palindromic Repeats (CRISPR) gene-editing system. The system includes a CRISPR Associated Protein 9 (Cas9) protein, and at least one guide RNA targeting an TP53INP1 gene, wherein the target sequence is adjacent to a protospacer adjacent motif (PAM) sequence for the Cas9 protein. In some embodiments, the at least one guide RNA includes a crRNA sequence that is complementary to a target sequence in any one of exons of the TP53INP1 gene. In some embodiments, the at least one guide RNA includes a crRNA sequence that is complementary to a target sequence in one of exons disclosed herein of the TP53INP1 gene. In some embodiments, the at least one guide RNA has a crRNA sequence having at least 75% identity to a sequence selected from SEQ ID NOs: 2530-2554. In some embodiments, the at least one guide RNA has a crRNA sequence having at least 80% identity to a sequence selected from SEQ ID NOs: 2530-2554. In some embodiments, the at least one guide RNA has a crRNA sequence having at least 85% identity to a sequence selected from SEQ ID NOs: 2530-2554. In some embodiments, the at least one guide RNA has a crRNA sequence having at least 90% identity to a sequence selected from SEQ ID NOs: 2530-2554. In some embodiments, the at least one guide RNA has a crRNA sequence having at least 95% identity to a sequence selected from SEQ ID NOs: 2530-2554. In some embodiments, the at least one guide RNA has a crRNA sequence selected from SEQ ID NOs: 2530-2554.

[0463] In some embodiments, the present disclosure provides method for the treatment or prevention of a joint disease or condition in a subject in need thereof. The method includes administering, to a joint of the subject, a pharmaceutical composition including a pharmaceutically effective amount of a composition having one or more nucleic acids encoding a Clustered Regularly Interspaced Short Palindromic Repeats (CRISPR) gene-editing system. The system includes a CRISPR Associated Protein 9 (Cas9) protein, and at least one guide RNA targeting an TP53INP1 gene, wherein the target sequence is adjacent to a protospacer adjacent motif (PAM) sequence for the Cas9 protein. In some embodiments, the at least one guide RNA includes a crRNA sequence that is complementary to a target sequence in any one of exons of the TP53INP1 gene. In some embodiments, the at least one guide RNA includes a crRNA sequence that is complementary to a target sequence in one of exons disclosed herein of the TP53INP1 gene. In some embodiments, the at least one guide RNA has a crRNA sequence having at least 75% identity to a sequence selected from SEQ ID NOs: 2530-2554. In some embodiments, the at least one guide RNA has a crRNA sequence having at least 80% identity to a sequence selected from SEQ ID NOs: 2530-2554. In some embodiments, the at least one guide RNA has a crRNA sequence having at least 85% identity to a sequence selected from SEQ ID NOs: 2530-2554. In some embodiments, the at least one guide RNA has a crRNA sequence having at least 90% identity to a sequence selected from SEQ ID NOs: 2530-2554. In some embodiments, the at least one guide RNA has a crRNA sequence having at least 95% identity to a sequence selected from SEQ ID NOs: 2530-2554. In some embodiments, the at least one guide RNA has a crRNA sequence selected from SEQ ID NOs: 2530-2554. In some embodiments, the joint disease or condition is arthritis, e.g., osteoarthritis. In some embodiments, the administering includes intra-articular injection of the pharmaceutical composition into the joint of the subject.

[0464] In some embodiments, the present disclosure provides a pharmaceutical composition for the treatment or prevention of a joint disease or condition, the composition including a therapeutically effective amount of one or more nucleic acids encoding a Clustered Regularly Interspaced Short Palindromic Repeats (CRISPR) gene-editing system. The system includes a CRISPR Associated Protein 9 (Cas9) protein, and at least one guide RNA targeting an UQCRC1 gene, wherein the target sequence is adjacent to a protospacer adjacent motif (PAM) sequence for the Cas9 protein. In some embodiments, the at least one guide RNA includes a crRNA sequence that is complementary to a target sequence in any one of exons of the UQCRC1 gene. In some embodiments, the at least one guide RNA includes a crRNA sequence that is complementary to a target sequence in one of exons disclosed herein of the UQCRC1 gene. In some embodiments, the at least one guide RNA has a crRNA sequence having at least 75% identity to a sequence selected from SEQ ID NOs: 2555-2579. In some embodiments, the at least one guide RNA has a crRNA sequence having at least 80% identity to a sequence selected from SEQ ID NOs: 2555-2579. In some embodiments, the at least one guide RNA has a crRNA sequence having at least 85% identity to a sequence selected from SEQ ID NOs: 2555-2579. In some embodiments, the at least one guide RNA has a crRNA sequence having at least 90% identity to a sequence selected from SEQ ID NOs: 2555-2579. In some embodiments, the at least one guide RNA has a crRNA sequence having at least 95% identity to a sequence selected from SEQ ID NOs: 2555-2579. In some embodiments, the at least one guide RNA has a crRNA sequence selected from SEQ ID NOs: 2555-2579.

[0465] In some embodiments, the present disclosure provides method for the treatment or prevention of a joint disease or condition in a subject in need thereof. The method includes administering, to a joint of the subject, a pharmaceutical composition including a pharmaceutically effective amount of a composition having one or more nucleic acids encoding a Clustered Regularly Interspaced Short Palindromic Repeats (CRISPR) gene-editing system. The system includes a CRISPR Associated Protein 9 (Cas9) protein, and at least one guide RNA targeting an UQCRC1 gene, wherein the target sequence is adjacent to a protospacer adjacent motif (PAM) sequence for the Cas9 protein. In some embodiments, the at least one guide RNA includes a crRNA sequence that is complementary to a target sequence in any one of exons of the UQCRC1 gene. In some embodiments, the at least one guide RNA includes a crRNA sequence that is complementary to a target sequence in one of exons disclosed herein of the UQCRC1 gene. In some embodiments, the at least one guide RNA has a crRNA sequence having at least 75% identity to a sequence selected from SEQ ID NOs: 2555-2579. In some embodiments, the at least one guide RNA has a crRNA sequence having at least 80% identity to a sequence selected from SEQ ID NOs: 2555-2579. In some embodiments, the at least one guide RNA has a crRNA sequence having at least 85% identity to a sequence selected from SEQ ID NOs: 2555-2579. In some embodiments, the at least one guide RNA has a crRNA sequence having at least 90% identity to a sequence selected from SEQ ID NOs: 2555-2579. In some embodiments, the at least one guide RNA has a crRNA sequence having at least 95% identity to a sequence selected from SEQ ID NOs: 2555-2579. In some embodiments, the at least one guide RNA has a crRNA sequence selected from SEQ ID NOs: 2555-2579. In some embodiments, the joint disease or condition is arthritis, e.g., osteoarthritis. In some embodiments, the administering includes intra-articular injection of the pharmaceutical composition into the joint of the subject.

[0466] In some embodiments, the present disclosure provides a pharmaceutical composition for the treatment or prevention of a joint disease or condition, the composition including a therapeutically effective amount of one or more nucleic acids encoding a Clustered Regularly Interspaced Short Palindromic Repeats (CRISPR) gene-editing system. The system includes a CRISPR Associated Protein 9 (Cas9) protein, and at least one guide RNA targeting an UQCRC2 gene, wherein the target sequence is adjacent to a protospacer adjacent motif (PAM) sequence for the Cas9 protein. In some embodiments, the at least one guide RNA includes a crRNA sequence that is complementary to a target sequence in any one of exons of the UQCRC2 gene. In some embodiments, the at least one guide RNA includes a crRNA sequence that is complementary to a target sequence in one of exons disclosed herein of the UQCRC2 gene. In some embodiments, the at least one guide RNA has a crRNA sequence having at least 75% identity to a sequence selected from SEQ ID NOs: 2580-2604. In some embodiments, the at least one guide RNA has a crRNA sequence having at least 80% identity to a sequence selected from SEQ ID NOs: 2580-2604. In some embodiments, the at least one guide RNA has a crRNA sequence having at least 85% identity to a sequence selected from SEQ ID NOs: 2580-2604. In some embodiments, the at least one guide RNA has a crRNA sequence having at least 90% identity to a sequence selected from SEQ ID NOs: 2580-2604. In some embodiments, the at least one guide RNA has a crRNA sequence having at least 95% identity to a sequence selected from SEQ ID NOs: 2580-2604. In some embodiments, the at least one guide RNA has a crRNA sequence selected from SEQ ID NOs: 2580-2604.

[0467] In some embodiments, the present disclosure provides method for the treatment or prevention of a joint disease or condition in a subject in need thereof. The method includes administering, to a joint of the subject, a pharmaceutical composition including a pharmaceutically effective amount of a composition having one or more nucleic acids encoding a Clustered Regularly Interspaced Short Palindromic Repeats (CRISPR) gene-editing system. The system includes a CRISPR Associated Protein 9 (Cas9) protein, and at least one guide RNA targeting an UQCRC2 gene, wherein the target sequence is adjacent to a protospacer adjacent motif (PAM) sequence for the Cas9 protein. In some embodiments, the at least one guide RNA includes a crRNA sequence that is complementary to a target sequence in any one of exons of the UQCRC2 gene. In some embodiments, the at least one guide RNA includes a crRNA sequence that is complementary to a target sequence in one of exons disclosed herein of the UQCRC2 gene. In some embodiments, the at least one guide RNA has a crRNA sequence having at least 75% identity to a sequence selected from SEQ ID NOs: 2580-2604. In some embodiments, the at least one guide RNA has a crRNA sequence having at least 80% identity to a sequence selected from SEQ ID NOs: 2580-2604. In some embodiments, the at least one guide RNA has a crRNA sequence having at least 85% identity to a sequence selected from SEQ ID NOs: 2580-2604. In some embodiments, the at least one guide RNA has a crRNA sequence having at least 90% identity to a sequence selected from SEQ ID NOs: 2580-2604. In some embodiments, the at least one guide RNA has a crRNA sequence having at least 95% identity to a sequence selected from SEQ ID NOs: 2580-2604. In some embodiments, the at least one guide RNA has a crRNA sequence selected from SEQ ID NOs: 2580-2604. In some embodiments, the joint disease or condition is arthritis, e.g., osteoarthritis. In some embodiments, the administering includes intra-articular injection of the pharmaceutical composition into the joint of the subject.

[0468] In some embodiments, the present disclosure provides a pharmaceutical composition for the treatment or prevention of a joint disease or condition, the composition including a therapeutically effective amount of one or more nucleic acids encoding a Clustered Regularly Interspaced Short Palindromic Repeats (CRISPR) gene-editing system. The system includes a CRISPR Associated Protein 9 (Cas9) protein, and at least one guide RNA targeting an CD244 gene, wherein the target sequence is adjacent to a protospacer adjacent motif (PAM) sequence for the Cas9 protein. In some embodiments, the at least one guide RNA includes a crRNA sequence that is complementary to a target sequence in any one of exons of the CD244 gene. In some embodiments, the at least one guide RNA includes a crRNA sequence that is complementary to a target sequence in one of exons disclosed herein of the CD244 gene. In some embodiments, the at least one guide RNA has a crRNA sequence having at least 75% identity to a sequence selected from SEQ ID NOs: 2605-2629. In some embodiments, the at least one guide RNA has a crRNA sequence having at least 80% identity to a sequence selected from SEQ ID NOs: 2605-2629. In some embodiments, the at least one guide RNA has a crRNA sequence having at least 85% identity to a sequence selected from SEQ ID NOs: 2605-2629. In some embodiments, the at least one guide RNA has a crRNA sequence having at least 90% identity to a sequence selected from SEQ ID NOs: 2605-2629. In some embodiments, the at least one guide RNA has a crRNA sequence having at least 95% identity to a sequence selected from SEQ ID NOs: 2605-2629. In some embodiments, the at least one guide RNA has a crRNA sequence selected from SEQ ID NOs: 2605-2629.

[0469] In some embodiments, the present disclosure provides method for the treatment or prevention of a joint disease or condition in a subject in need thereof. The method includes administering, to a joint of the subject, a pharmaceutical composition including a pharmaceutically effective amount of a composition having one or more nucleic acids encoding a Clustered Regularly Interspaced Short Palindromic Repeats (CRISPR) gene-editing system. The system includes a CRISPR Associated Protein 9 (Cas9) protein, and at least one guide RNA targeting an CD244 gene, wherein the target sequence is adjacent to a protospacer adjacent motif (PAM) sequence for the Cas9 protein. In some embodiments, the at least one guide RNA includes a crRNA sequence that is complementary to a target sequence in any one of exons of the CD244 gene. In some embodiments, the at least one guide RNA includes a crRNA sequence that is complementary to a target sequence in one of exons disclosed herein of the CD244 gene. In some embodiments, the at least one guide RNA has a crRNA sequence having at least 75% identity to a sequence selected from SEQ ID NOs: 2605-2629. In some embodiments, the at least one guide RNA has a crRNA sequence having at least 80% identity to a sequence selected from SEQ ID NOs: 2605-2629. In some embodiments, the at least one guide RNA has a crRNA sequence having at least 85% identity to a sequence selected from SEQ ID NOs: 2605-2629. In some embodiments, the at least one guide RNA has a crRNA sequence having at least 90% identity to a sequence selected from SEQ ID NOs: 2605-2629. In some embodiments, the at least one guide RNA has a crRNA sequence having at least 95% identity to a sequence selected from SEQ ID NOs: 2605-2629. In some embodiments, the at least one guide RNA has a crRNA sequence selected from SEQ ID NOs: 2605-2629. In some embodiments, the joint disease or condition is arthritis, e.g., osteoarthritis. In some embodiments, the administering includes intra-articular injection of the pharmaceutical composition into the joint of the subject.

[0470] In some embodiments, the present disclosure provides a pharmaceutical composition for the treatment or prevention of a joint disease or condition, the composition including a therapeutically effective amount of one or more nucleic acids encoding a Clustered Regularly Interspaced Short Palindromic Repeats (CRISPR) gene-editing system. The system includes a CRISPR Associated Protein 9 (Cas9) protein, and at least one guide RNA targeting an ABCA1 gene, wherein the target sequence is adjacent to a protospacer adjacent motif (PAM) sequence for the Cas9 protein. In some embodiments, the at least one guide RNA includes a crRNA sequence that is complementary to a target sequence in any one of exons of the ABCA1 gene. In some embodiments, the at least one guide RNA includes a crRNA sequence that is complementary to a target sequence in one of exons disclosed herein of the ABCA1 gene. In some embodiments, the at least one guide RNA has a crRNA sequence having at least 75% identity to a sequence selected from SEQ ID NOs: 2630-2654. In some embodiments, the at least one guide RNA has a crRNA sequence having at least 80% identity to a sequence selected from SEQ ID NOs: 2630-2654. In some embodiments, the at least one guide RNA has a crRNA sequence having at least 85% identity to a sequence selected from SEQ ID NOs: 2630-2654. In some embodiments, the at least one guide RNA has a crRNA sequence having at least 90% identity to a sequence selected from SEQ ID NOs: 2630-2654. In some embodiments, the at least one guide RNA has a crRNA sequence having at least 95% identity to a sequence selected from SEQ ID NOs: 2630-2654. In some embodiments, the at least one guide RNA has a crRNA sequence selected from SEQ ID NOs: 2630-2654.

[0471] In some embodiments, the present disclosure provides method for the treatment or prevention of a joint disease or condition in a subject in need thereof. The method includes administering, to a joint of the subject, a pharmaceutical composition including a pharmaceutically effective amount of a composition having one or more nucleic acids encoding a Clustered Regularly Interspaced Short Palindromic Repeats (CRISPR) gene-editing system. The system includes a CRISPR Associated Protein 9 (Cas9) protein, and at least one guide RNA targeting an ABCA1 gene, wherein the target sequence is adjacent to a protospacer adjacent motif (PAM) sequence for the Cas9 protein. In some embodiments, the at least one guide RNA includes a crRNA sequence that is complementary to a target sequence in any one of exons of the ABCA1 gene. In some embodiments, the at least one guide RNA includes a crRNA sequence that is complementary to a target sequence in one of exons disclosed herein of the ABCA1 gene. In some embodiments, the at least one guide RNA has a crRNA sequence having at least 75% identity to a sequence selected from SEQ ID NOs: 2630-2654. In some embodiments, the at least one guide RNA has a crRNA sequence having at least 80% identity to a sequence selected from SEQ ID NOs: 2630-2654. In some embodiments, the at least one guide RNA has a crRNA sequence having at least 85% identity to a sequence selected from SEQ ID NOs: 2630-2654. In some embodiments, the at least one guide RNA has a crRNA sequence having at least 90% identity to a sequence selected from SEQ ID NOs: 2630-2654. In some embodiments, the at least one guide RNA has a crRNA sequence having at least 95% identity to a sequence selected from SEQ ID NOs: 2630-2654. In some embodiments, the at least one guide RNA has a crRNA sequence selected from SEQ ID NOs: 2630-2654. In some embodiments, the joint disease or condition is arthritis, e.g., osteoarthritis. In some embodiments, the administering includes intra-articular injection of the pharmaceutical composition into the joint of the subject.

[0472] In some embodiments, the present disclosure provides a pharmaceutical composition for the treatment or prevention of a joint disease or condition, the composition including a therapeutically effective amount of one or more nucleic acids encoding a Clustered Regularly Interspaced Short Palindromic Repeats (CRISPR) gene-editing system. The system includes a CRISPR Associated Protein 9 (Cas9) protein, and at least one guide RNA targeting an ACP5 gene, wherein the target sequence is adjacent to a protospacer adjacent motif (PAM) sequence for the Cas9 protein. In some embodiments, the at least one guide RNA includes a crRNA sequence that is complementary to a target sequence in any one of exons of the ACP5 gene. In some embodiments, the at least one guide RNA includes a crRNA sequence that is complementary to a target sequence in one of exons disclosed herein of the ACP5 gene. In some embodiments, the at least one guide RNA has a crRNA sequence having at least 75% identity to a sequence selected from SEQ ID NOs: 2655-2679. In some embodiments, the at least one guide RNA has a crRNA sequence having at least 80% identity to a sequence selected from SEQ ID NOs: 2655-2679. In some embodiments, the at least one guide RNA has a crRNA sequence having at least 85% identity to a sequence selected from SEQ ID NOs: 2655-2679. In some embodiments, the at least one guide RNA has a crRNA sequence having at least 90% identity to a sequence selected from SEQ ID NOs: 2655-2679. In some embodiments, the at least one guide RNA has a crRNA sequence having at least 95% identity to a sequence selected from SEQ ID NOs: 2655-2679. In some embodiments, the at least one guide RNA has a crRNA sequence selected from SEQ ID NOs: 2655-2679.

[0473] In some embodiments, the present disclosure provides method for the treatment or prevention of a joint disease or condition in a subject in need thereof. The method includes administering, to a joint of the subject, a pharmaceutical composition including a pharmaceutically effective amount of a composition having one or more nucleic acids encoding a Clustered Regularly Interspaced Short Palindromic Repeats (CRISPR) gene-editing system. The system includes a CRISPR Associated Protein 9 (Cas9) protein, and at least one guide RNA targeting an ACP5 gene, wherein the target sequence is adjacent to a protospacer adjacent motif (PAM) sequence for the Cas9 protein. In some embodiments, the at least one guide RNA includes a crRNA sequence that is complementary to a target sequence in any one of exons of the ACP5 gene. In some embodiments, the at least one guide RNA includes a crRNA sequence that is complementary to a target sequence in one of exons disclosed herein of the ACP5 gene. In some embodiments, the at least one guide RNA has a crRNA sequence having at least 75% identity to a sequence selected from SEQ ID NOs: 2655-2679. In some embodiments, the at least one guide RNA has a crRNA sequence having at least 80% identity to a sequence selected from SEQ ID NOs: 2655-2679. In some embodiments, the at least one guide RNA has a crRNA sequence having at least 85% identity to a sequence selected from SEQ ID NOs: 2655-2679. In some embodiments, the at least one guide RNA has a crRNA sequence having at least 90% identity to a sequence selected from SEQ ID NOs: 2655-2679. In some embodiments, the at least one guide RNA has a crRNA sequence having at least 95% identity to a sequence selected from SEQ ID NOs: 2655-2679. In some embodiments, the at least one guide RNA has a crRNA sequence selected from SEQ ID NOs: 2655-2679. In some embodiments, the joint disease or condition is arthritis, e.g., osteoarthritis. In some embodiments, the administering includes intra-articular injection of the pharmaceutical composition into the joint of the subject.

[0474] In some embodiments, the present disclosure provides a pharmaceutical composition for the treatment or prevention of a joint disease or condition, the composition including a therapeutically effective amount of one or more nucleic acids encoding a Clustered Regularly Interspaced Short Palindromic Repeats (CRISPR) gene-editing system. The system includes a CRISPR Associated Protein 9 (Cas9) protein, and at least one guide RNA targeting an ADAR gene, wherein the target sequence is adjacent to a protospacer adjacent motif (PAM) sequence for the Cas9 protein. In some embodiments, the at least one guide RNA includes a crRNA sequence that is complementary to a target sequence in any one of exons of the ADAR gene. In some embodiments, the at least one guide RNA includes a crRNA sequence that is complementary to a target sequence in one of exons disclosed herein of the ADAR gene. In some embodiments, the at least one guide RNA has a crRNA sequence having at least 75% identity to a sequence selected from SEQ ID NOs: 2680-2704. In some embodiments, the at least one guide RNA has a crRNA sequence having at least 80% identity to a sequence selected from SEQ ID NOs: 2680-2704. In some embodiments, the at least one guide RNA has a crRNA sequence having at least 85% identity to a sequence selected from SEQ ID NOs: 2680-2704. In some embodiments, the at least one guide RNA has a crRNA sequence having at least 90% identity to a sequence selected from SEQ ID NOs: 2680-2704. In some embodiments, the at least one guide RNA has a crRNA sequence having at least 95% identity to a sequence selected from SEQ ID NOs: 2680-2704. In some embodiments, the at least one guide RNA has a crRNA sequence selected from SEQ ID NOs: 2680-2704.

[0475] In some embodiments, the present disclosure provides method for the treatment or prevention of a joint disease or condition in a subject in need thereof. The method includes administering, to a joint of the subject, a pharmaceutical composition including a pharmaceutically effective amount of a composition having one or more nucleic acids encoding a Clustered Regularly Interspaced Short Palindromic Repeats (CRISPR) gene-editing system. The system includes a CRISPR Associated Protein 9 (Cas9) protein, and at least one guide RNA targeting an ADAR gene, wherein the target sequence is adjacent to a protospacer adjacent motif (PAM) sequence for the Cas9 protein. In some embodiments, the at least one guide RNA includes a crRNA sequence that is complementary to a target sequence in any one of exons of the ADAR gene. In some embodiments, the at least one guide RNA includes a crRNA sequence that is complementary to a target sequence in one of exons disclosed herein of the ADAR gene. In some embodiments, the at least one guide RNA has a crRNA sequence having at least 75% identity to a sequence selected from SEQ ID NOs: 2680-2704. In some embodiments, the at least one guide RNA has a crRNA sequence having at least 80% identity to a sequence selected from SEQ ID NOs: 2680-2704. In some embodiments, the at least one guide RNA has a crRNA sequence having at least 85% identity to a sequence selected from SEQ ID NOs: 2680-2704. In some embodiments, the at least one guide RNA has a crRNA sequence having at least 90% identity to a sequence selected from SEQ ID NOs: 2680-2704. In some embodiments, the at least one guide RNA has a crRNA sequence having at least 95% identity to a sequence selected from SEQ ID NOs: 2680-2704. In some embodiments, the at least one guide RNA has a crRNA sequence selected from SEQ ID NOs: 2680-2704. In some embodiments, the joint disease or condition is arthritis, e.g., osteoarthritis. In some embodiments, the administering includes intra-articular injection of the pharmaceutical composition into the joint of the subject.

[0476] In some embodiments, the present disclosure provides a pharmaceutical composition for the treatment or prevention of a joint disease or condition, the composition including a therapeutically effective amount of one or more nucleic acids encoding a Clustered Regularly Interspaced Short Palindromic Repeats (CRISPR) gene-editing system. The system includes a CRISPR Associated Protein 9 (Cas9) protein, and at least one guide RNA targeting an ADSS1 gene, wherein the target sequence is adjacent to a protospacer adjacent motif (PAM) sequence for the Cas9 protein. In some embodiments, the at least one guide RNA includes a crRNA sequence that is complementary to a target sequence in any one of exons of the ADSS1 gene. In some embodiments, the at least one guide RNA includes a crRNA sequence that is complementary to a target sequence in one of exons disclosed herein of the ADSS1 gene. In some embodiments, the at least one guide RNA has a crRNA sequence having at least 75% identity to a sequence selected from SEQ ID NOs: 2705-2729. In some embodiments, the at least one guide RNA has a crRNA sequence having at least 80% identity to a sequence selected from SEQ ID NOs: 2705-2729. In some embodiments, the at least one guide RNA has a crRNA sequence having at least 85% identity to a sequence selected from SEQ ID NOs: 2705-2729. In some embodiments, the at least one guide RNA has a crRNA sequence having at least 90% identity to a sequence selected from SEQ ID NOs: 2705-2729. In some embodiments, the at least one guide RNA has a crRNA sequence having at least 95% identity to a sequence selected from SEQ ID NOs: 2705-2729. In some embodiments, the at least one guide RNA has a crRNA sequence selected from SEQ ID NOs: 2705-2729.

[0477] In some embodiments, the present disclosure provides method for the treatment or prevention of a joint disease or condition in a subject in need thereof. The method includes administering, to a joint of the subject, a pharmaceutical composition including a pharmaceutically effective amount of a composition having one or more nucleic acids encoding a Clustered Regularly Interspaced Short Palindromic Repeats (CRISPR) gene-editing system. The system includes a CRISPR Associated Protein 9 (Cas9) protein, and at least one guide RNA targeting an ADSS1 gene, wherein the target sequence is adjacent to a protospacer adjacent motif (PAM) sequence for the Cas9 protein. In some embodiments, the at least one guide RNA includes a crRNA sequence that is complementary to a target sequence in any one of exons of the ADSS1 gene. In some embodiments, the at least one guide RNA includes a crRNA sequence that is complementary to a target sequence in one of exons disclosed herein of the ADSS1 gene. In some embodiments, the at least one guide RNA has a crRNA sequence having at least 75% identity to a sequence selected from SEQ ID NOs: 2705-2729. In some embodiments, the at least one guide RNA has a crRNA sequence having at least 80% identity to a sequence selected from SEQ ID NOs: 2705-2729. In some embodiments, the at least one guide RNA has a crRNA sequence having at least 85% identity to a sequence selected from SEQ ID NOs: 2705-2729. In some embodiments, the at least one guide RNA has a crRNA sequence having at least 90% identity to a sequence selected from SEQ ID NOs: 2705-2729. In some embodiments, the at least one guide RNA has a crRNA sequence having at least 95% identity to a sequence selected from SEQ ID NOs: 2705-2729. In some embodiments, the at least one guide RNA has a crRNA sequence selected from SEQ ID NOs: 2705-2729. In some embodiments, the joint disease or condition is arthritis, e.g., osteoarthritis. In some embodiments, the administering includes intra-articular injection of the pharmaceutical composition into the joint of the subject.

[0478] In some embodiments, the present disclosure provides a pharmaceutical composition for the treatment or prevention of a joint disease or condition, the composition including a therapeutically effective amount of one or more nucleic acids encoding a Clustered Regularly Interspaced Short Palindromic Repeats (CRISPR) gene-editing system. The system includes a CRISPR Associated Protein 9 (Cas9) protein, and at least one guide RNA targeting an ADSS2 gene, wherein the target sequence is adjacent to a protospacer adjacent motif (PAM) sequence for the Cas9 protein. In some embodiments, the at least one guide RNA includes a crRNA sequence that is complementary to a target sequence in any one of exons of the ADSS2 gene. In some embodiments, the at least one guide RNA includes a crRNA sequence that is complementary to a target sequence in one of exons disclosed herein of the ADSS2 gene. In some embodiments, the at least one guide RNA has a crRNA sequence having at least 75% identity to a sequence selected from SEQ ID NOs: 2730-2754. In some embodiments, the at least one guide RNA has a crRNA sequence having at least 80% identity to a sequence selected from SEQ ID NOs: 2730-2754. In some embodiments, the at least one guide RNA has a crRNA sequence having at least 85% identity to a sequence selected from SEQ ID NOs: 2730-2754. In some embodiments, the at least one guide RNA has a crRNA sequence having at least 90% identity to a sequence selected from SEQ ID NOs: 2730-2754. In some embodiments, the at least one guide RNA has a crRNA sequence having at least 95% identity to a sequence selected from SEQ ID NOs: 2730-2754. In some embodiments, the at least one guide RNA has a crRNA sequence selected from SEQ ID NOs: 2730-2754.

[0479] In some embodiments, the present disclosure provides method for the treatment or prevention of a joint disease or condition in a subject in need thereof. The method includes administering, to a joint of the subject, a pharmaceutical composition including a pharmaceutically effective amount of a composition having one or more nucleic acids encoding a Clustered Regularly Interspaced Short Palindromic Repeats (CRISPR) gene-editing system. The system includes a CRISPR Associated Protein 9 (Cas9) protein, and at least one guide RNA targeting an ADSS2 gene, wherein the target sequence is adjacent to a protospacer adjacent motif (PAM) sequence for the Cas9 protein. In some embodiments, the at least one guide RNA includes a crRNA sequence that is complementary to a target sequence in any one of exons of the ADSS2 gene. In some embodiments, the at least one guide RNA includes a crRNA sequence that is complementary to a target sequence in one of exons disclosed herein of the ADSS2 gene. In some embodiments, the at least one guide RNA has a crRNA sequence having at least 75% identity to a sequence selected from SEQ ID NOs: 2730-2754. In some embodiments, the at least one guide RNA has a crRNA sequence having at least 80% identity to a sequence selected from SEQ ID NOs: 2730-2754. In some embodiments, the at least one guide RNA has a crRNA sequence having at least 85% identity to a sequence selected from SEQ ID NOs: 2730-2754. In some embodiments, the at least one guide RNA has a crRNA sequence having at least 90% identity to a sequence selected from SEQ ID NOs: 2730-2754. In some embodiments, the at least one guide RNA has a crRNA sequence having at least 95% identity to a sequence selected from SEQ ID NOs: 2730-2754. In some embodiments, the at least one guide RNA has a crRNA sequence selected from SEQ ID NOs: 2730-2754. In some embodiments, the joint disease or condition is arthritis, e.g., osteoarthritis. In some embodiments, the administering includes intra-articular injection of the pharmaceutical composition into the joint of the subject.

[0480] In some embodiments, the present disclosure provides a pharmaceutical composition for the treatment or prevention of a joint disease or condition, the composition including a therapeutically effective amount of one or more nucleic acids encoding a Clustered Regularly Interspaced Short Palindromic Repeats (CRISPR) gene-editing system. The system includes a CRISPR Associated Protein 9 (Cas9) protein, and at least one guide RNA targeting an AIG1 gene, wherein the target sequence is adjacent to a protospacer adjacent motif (PAM) sequence for the Cas9 protein. In some embodiments, the at least one guide RNA includes a crRNA sequence that is complementary to a target sequence in any one of exons of the AIG1 gene. In some embodiments, the at least one guide RNA includes a crRNA sequence that is complementary to a target sequence in one of exons disclosed herein of the AIG1 gene. In some embodiments, the at least one guide RNA has a crRNA sequence having at least 75% identity to a sequence selected from SEQ ID NOs: 2755-2779. In some embodiments, the at least one guide RNA has a crRNA sequence having at least 80% identity to a sequence selected from SEQ ID NOs: 2755-2779. In some embodiments, the at least one guide RNA has a crRNA sequence having at least 85% identity to a sequence selected from SEQ ID NOs: 2755-2779. In some embodiments, the at least one guide RNA has a crRNA sequence having at least 90% identity to a sequence selected from SEQ ID NOs: 2755-2779. In some embodiments, the at least one guide RNA has a crRNA sequence having at least 95% identity to a sequence selected from SEQ ID NOs: 2755-2779. In some embodiments, the at least one guide RNA has a crRNA sequence selected from SEQ ID NOs: 2755-2779.

[0481] In some embodiments, the present disclosure provides method for the treatment or prevention of a joint disease or condition in a subject in need thereof. The method includes administering, to a joint of the subject, a pharmaceutical composition including a pharmaceutically effective amount of a composition having one or more nucleic acids encoding a Clustered Regularly Interspaced Short Palindromic Repeats (CRISPR) gene-editing system. The system includes a CRISPR Associated Protein 9 (Cas9) protein, and at least one guide RNA targeting an AIG1 gene, wherein the target sequence is adjacent to a protospacer adjacent motif (PAM) sequence for the Cas9 protein. In some embodiments, the at least one guide RNA includes a crRNA sequence that is complementary to a target sequence in any one of exons of the AIG1 gene. In some embodiments, the at least one guide RNA includes a crRNA sequence that is complementary to a target sequence in one of exons disclosed herein of the AIG1 gene. In some embodiments, the at least one guide RNA has a crRNA sequence having at least 75% identity to a sequence selected from SEQ ID NOs: 2755-2779. In some embodiments, the at least one guide RNA has a crRNA sequence having at least 80% identity to a sequence selected from SEQ ID NOs: 2755-2779. In some embodiments, the at least one guide RNA has a crRNA sequence having at least 85% identity to a sequence selected from SEQ ID NOs: 2755-2779. In some embodiments, the at least one guide RNA has a crRNA sequence having at least 90% identity to a sequence selected from SEQ ID NOs: 2755-2779. In some embodiments, the at least one guide RNA has a crRNA sequence having at least 95% identity to a sequence selected from SEQ ID NOs: 2755-2779. In some embodiments, the at least one guide RNA has a crRNA sequence selected from SEQ ID NOs: 2755-2779. In some embodiments, the joint disease or condition is arthritis, e.g., osteoarthritis. In some embodiments, the administering includes intra-articular injection of the pharmaceutical composition into the joint of the subject.

[0482] In some embodiments, the present disclosure provides a pharmaceutical composition for the treatment or prevention of a joint disease or condition, the composition including a therapeutically effective amount of one or more nucleic acids encoding a Clustered Regularly Interspaced Short Palindromic Repeats (CRISPR) gene-editing system. The system includes a CRISPR Associated Protein 9 (Cas9) protein, and at least one guide RNA targeting an AIM2 gene, wherein the target sequence is adjacent to a protospacer adjacent motif (PAM) sequence for the Cas9 protein. In some embodiments, the at least one guide RNA includes a crRNA sequence that is complementary to a target sequence in any one of exons of the AIM2 gene. In some embodiments, the at least one guide RNA includes a crRNA sequence that is complementary to a target sequence in one of exons disclosed herein of the AIM2 gene. In some embodiments, the at least one guide RNA has a crRNA sequence having at least 75% identity to a sequence selected from SEQ ID NOs: 2780-2804. In some embodiments, the at least one guide RNA has a crRNA sequence having at least 80% identity to a sequence selected from SEQ ID NOs: 2780-2804. In some embodiments, the at least one guide RNA has a crRNA sequence having at least 85% identity to a sequence selected from SEQ ID NOs: 2780-2804. In some embodiments, the at least one guide RNA has a crRNA sequence having at least 90% identity to a sequence selected from SEQ ID NOs: 2780-2804. In some embodiments, the at least one guide RNA has a crRNA sequence having at least 95% identity to a sequence selected from SEQ ID NOs: 2780-2804. In some embodiments, the at least one guide RNA has a crRNA sequence selected from SEQ ID NOs: 2780-2804.

[0483] In some embodiments, the present disclosure provides method for the treatment or prevention of a joint disease or condition in a subject in need thereof. The method includes administering, to a joint of the subject, a pharmaceutical composition including a pharmaceutically effective amount of a composition having one or more nucleic acids encoding a Clustered Regularly Interspaced Short Palindromic Repeats (CRISPR) gene-editing system. The system includes a CRISPR Associated Protein 9 (Cas9) protein, and at least one guide RNA targeting an AIM2 gene, wherein the target sequence is adjacent to a protospacer adjacent motif (PAM) sequence for the Cas9 protein. In some embodiments, the at least one guide RNA includes a crRNA sequence that is complementary to a target sequence in any one of exons of the AIM2 gene. In some embodiments, the at least one guide RNA includes a crRNA sequence that is complementary to a target sequence in one of exons disclosed herein of the AIM2 gene. In some embodiments, the at least one guide RNA has a crRNA sequence having at least 75% identity to a sequence selected from SEQ ID NOs: 2780-2804. In some embodiments, the at least one guide RNA has a crRNA sequence having at least 80% identity to a sequence selected from SEQ ID NOs: 2780-2804. In some embodiments, the at least one guide RNA has a crRNA sequence having at least 85% identity to a sequence selected from SEQ ID NOs: 2780-2804. In some embodiments, the at least one guide RNA has a crRNA sequence having at least 90% identity to a sequence selected from SEQ ID NOs: 2780-2804. In some embodiments, the at least one guide RNA has a crRNA sequence having at least 95% identity to a sequence selected from SEQ ID NOs: 2780-2804. In some embodiments, the at least one guide RNA has a crRNA sequence selected from SEQ ID NOs: 2780-2804. In some embodiments, the joint disease or condition is arthritis, e.g., osteoarthritis. In some embodiments, the administering includes intra-articular injection of the pharmaceutical composition into the joint of the subject.

[0484] In some embodiments, the present disclosure provides a pharmaceutical composition for the treatment or prevention of a joint disease or condition, the composition including a therapeutically effective amount of one or more nucleic acids encoding a Clustered Regularly Interspaced Short Palindromic Repeats (CRISPR) gene-editing system. The system includes a CRISPR Associated Protein 9 (Cas9) protein, and at least one guide RNA targeting an APOBEC3A gene, wherein the target sequence is adjacent to a protospacer adjacent motif (PAM) sequence for the Cas9 protein. In some embodiments, the at least one guide RNA includes a crRNA sequence that is complementary to a target sequence in any one of exons of the APOBEC3A gene. In some embodiments, the at least one guide RNA includes a crRNA sequence that is complementary to a target sequence in one of exons disclosed herein of the APOBEC3A gene. In some embodiments, the at least one guide RNA has a crRNA sequence having at least 75% identity to a sequence selected from SEQ ID NOs: 2805-2829. In some embodiments, the at least one guide RNA has a crRNA sequence having at least 80% identity to a sequence selected from SEQ ID NOs: 2805-2829. In some embodiments, the at least one guide RNA has a crRNA sequence having at least 85% identity to a sequence selected from SEQ ID NOs: 2805-2829. In some embodiments, the at least one guide RNA has a crRNA sequence having at least 90% identity to a sequence selected from SEQ ID NOs: 2805-2829. In some embodiments, the at least one guide RNA has a crRNA sequence having at least 95% identity to a sequence selected from SEQ ID NOs: 2805-2829. In some embodiments, the at least one guide RNA has a crRNA sequence selected from SEQ ID NOs: 2805-2829.

[0485] In some embodiments, the present disclosure provides method for the treatment or prevention of a joint disease or condition in a subject in need thereof. The method includes administering, to a joint of the subject, a pharmaceutical composition including a pharmaceutically effective amount of a composition having one or more nucleic acids encoding a Clustered Regularly Interspaced Short Palindromic Repeats (CRISPR) gene-editing system. The system includes a CRISPR Associated Protein 9 (Cas9) protein, and at least one guide RNA targeting an APOBEC3A gene, wherein the target sequence is adjacent to a protospacer adjacent motif (PAM) sequence for the Cas9 protein. In some embodiments, the at least one guide RNA includes a crRNA sequence that is complementary to a target sequence in any one of exons of the APOBEC3A gene. In some embodiments, the at least one guide RNA includes a crRNA sequence that is complementary to a target sequence in one of exons disclosed herein of the APOBEC3A gene. In some embodiments, the at least one guide RNA has a crRNA sequence having at least 75% identity to a sequence selected from SEQ ID NOs: 2805-2829. In some embodiments, the at least one guide RNA has a crRNA sequence having at least 80% identity to a sequence selected from SEQ ID NOs: 2805-2829. In some embodiments, the at least one guide RNA has a crRNA sequence having at least 85% identity to a sequence selected from SEQ ID NOs: 2805-2829. In some embodiments, the at least one guide RNA has a crRNA sequence having at least 90% identity to a sequence selected from SEQ ID NOs: 2805-2829. In some embodiments, the at least one guide RNA has a crRNA sequence having at least 95% identity to a sequence selected from SEQ ID NOs: 2805-2829. In some embodiments, the at least one guide RNA has a crRNA sequence selected from SEQ ID NOs: 2805-2829. In some embodiments, the joint disease or condition is arthritis, e.g., osteoarthritis. In some embodiments, the administering includes intra-articular injection of the pharmaceutical composition into the joint of the subject.

[0486] In some embodiments, the present disclosure provides a pharmaceutical composition for the treatment or prevention of a joint disease or condition, the composition including a therapeutically effective amount of one or more nucleic acids encoding a Clustered Regularly Interspaced Short Palindromic Repeats (CRISPR) gene-editing system. The system includes a CRISPR Associated Protein 9 (Cas9) protein, and at least one guide RNA targeting an APOBEC3B gene, wherein the target sequence is adjacent to a protospacer adjacent motif (PAM) sequence for the Cas9 protein. In some embodiments, the at least one guide RNA includes a crRNA sequence that is complementary to a target sequence in any one of exons of the APOBEC3B gene. In some embodiments, the at least one guide RNA includes a crRNA sequence that is complementary to a target sequence in one of exons disclosed herein of the APOBEC3B gene. In some embodiments, the at least one guide RNA has a crRNA sequence having at least 75% identity to a sequence selected from SEQ ID NOs: 2830-2854. In some embodiments, the at least one guide RNA has a crRNA sequence having at least 80% identity to a sequence selected from SEQ ID NOs: 2830-2854. In some embodiments, the at least one guide RNA has a crRNA sequence having at least 85% identity to a sequence selected from SEQ ID NOs: 2830-2854. In some embodiments, the at least one guide RNA has a crRNA sequence having at least 90% identity to a sequence selected from SEQ ID NOs: 2830-2854. In some embodiments, the at least one guide RNA has a crRNA sequence having at least 95% identity to a sequence selected from SEQ ID NOs: 2830-2854. In some embodiments, the at least one guide RNA has a crRNA sequence selected from SEQ ID NOs: 2830-2854.

[0487] In some embodiments, the present disclosure provides method for the treatment or prevention of a joint disease or condition in a subject in need thereof. The method includes administering, to a joint of the subject, a pharmaceutical composition including a pharmaceutically effective amount of a composition having one or more nucleic acids encoding a Clustered Regularly Interspaced Short Palindromic Repeats (CRISPR) gene-editing system. The system includes a CRISPR Associated Protein 9 (Cas9) protein, and at least one guide RNA targeting an APOBEC3B gene, wherein the target sequence is adjacent to a protospacer adjacent motif (PAM) sequence for the Cas9 protein. In some embodiments, the at least one guide RNA includes a crRNA sequence that is complementary to a target sequence in any one of exons of the APOBEC3B gene. In some embodiments, the at least one guide RNA includes a crRNA sequence that is complementary to a target sequence in one of exons disclosed herein of the APOBEC3B gene. In some embodiments, the at least one guide RNA has a crRNA sequence having at least 75% identity to a sequence selected from SEQ ID NOs: 2830-2854. In some embodiments, the at least one guide RNA has a crRNA sequence having at least 80% identity to a sequence selected from SEQ ID NOs: 2830-2854. In some embodiments, the at least one guide RNA has a crRNA sequence having at least 85% identity to a sequence selected from SEQ ID NOs: 2830-2854. In some embodiments, the at least one guide RNA has a crRNA sequence having at least 90% identity to a sequence selected from SEQ ID NOs: 2830-2854. In some embodiments, the at least one guide RNA has a crRNA sequence having at least 95% identity to a sequence selected from SEQ ID NOs: 2830-2854. In some embodiments, the at least one guide RNA has a crRNA sequence selected from SEQ ID NOs: 2830-2854. In some embodiments, the joint disease or condition is arthritis, e.g., osteoarthritis. In some embodiments, the administering includes intra-articular injection of the pharmaceutical composition into the joint of the subject.

[0488] In some embodiments, the present disclosure provides a pharmaceutical composition for the treatment or prevention of a joint disease or condition, the composition including a therapeutically effective amount of one or more nucleic acids encoding a Clustered Regularly Interspaced Short Palindromic Repeats (CRISPR) gene-editing system. The system includes a CRISPR Associated Protein 9 (Cas9) protein, and at least one guide RNA targeting an APOBEC3C gene, wherein the target sequence is adjacent to a protospacer adjacent motif (PAM) sequence for the Cas9 protein. In some embodiments, the at least one guide RNA includes a crRNA sequence that is complementary to a target sequence in any one of exons of the APOBEC3C gene. In some embodiments, the at least one guide RNA includes a crRNA sequence that is complementary to a target sequence in one of exons disclosed herein of the APOBEC3C gene. In some embodiments, the at least one guide RNA has a crRNA sequence having at least 75% identity to a sequence selected from SEQ ID NOs: 2855-2879. In some embodiments, the at least one guide RNA has a crRNA sequence having at least 80% identity to a sequence selected from SEQ ID NOs: 2855-2879. In some embodiments, the at least one guide RNA has a crRNA sequence having at least 85% identity to a sequence selected from SEQ ID NOs: 2855-2879. In some embodiments, the at least one guide RNA has a crRNA sequence having at least 90% identity to a sequence selected from SEQ ID NOs: 2855-2879. In some embodiments, the at least one guide RNA has a crRNA sequence having at least 95% identity to a sequence selected from SEQ ID NOs: 2855-2879. In some embodiments, the at least one guide RNA has a crRNA sequence selected from SEQ ID NOs: 2855-2879.

[0489] In some embodiments, the present disclosure provides method for the treatment or prevention of a joint disease or condition in a subject in need thereof. The method includes administering, to a joint of the subject, a pharmaceutical composition including a pharmaceutically effective amount of a composition having one or more nucleic acids encoding a Clustered Regularly Interspaced Short Palindromic Repeats (CRISPR) gene-editing system. The system includes a CRISPR Associated Protein 9 (Cas9) protein, and at least one guide RNA targeting an APOBEC3C gene, wherein the target sequence is adjacent to a protospacer adjacent motif (PAM) sequence for the Cas9 protein. In some embodiments, the at least one guide RNA includes a crRNA sequence that is complementary to a target sequence in any one of exons of the APOBEC3C gene. In some embodiments, the at least one guide RNA includes a crRNA sequence that is complementary to a target sequence in one of exons disclosed herein of the APOBEC3C gene. In some embodiments, the at least one guide RNA has a crRNA sequence having at least 75% identity to a sequence selected from SEQ ID NOs: 2855-2879. In some embodiments, the at least one guide RNA has a crRNA sequence having at least 80% identity to a sequence selected from SEQ ID NOs: 2855-2879. In some embodiments, the at least one guide RNA has a crRNA sequence having at least 85% identity to a sequence selected from SEQ ID NOs: 2855-2879. In some embodiments, the at least one guide RNA has a crRNA sequence having at least 90% identity to a sequence selected from SEQ ID NOs: 2855-2879. In some embodiments, the at least one guide RNA has a crRNA sequence having at least 95% identity to a sequence selected from SEQ ID NOs: 2855-2879. In some embodiments, the at least one guide RNA has a crRNA sequence selected from SEQ ID NOs: 2855-2879. In some embodiments, the joint disease or condition is arthritis, e.g., osteoarthritis. In some embodiments, the administering includes intra-articular injection of the pharmaceutical composition into the joint of the subject.

[0490] In some embodiments, the present disclosure provides a pharmaceutical composition for the treatment or prevention of a joint disease or condition, the composition including a therapeutically effective amount of one or more nucleic acids encoding a Clustered Regularly Interspaced Short Palindromic Repeats (CRISPR) gene-editing system. The system includes a CRISPR Associated Protein 9 (Cas9) protein, and at least one guide RNA targeting an APOBEC3D gene, wherein the target sequence is adjacent to a protospacer adjacent motif (PAM) sequence for the Cas9 protein. In some embodiments, the at least one guide RNA includes a crRNA sequence that is complementary to a target sequence in any one of exons of the APOBEC3D gene. In some embodiments, the at least one guide RNA includes a crRNA sequence that is complementary to a target sequence in one of exons disclosed herein of the APOBEC3D gene. In some embodiments, the at least one guide RNA has a crRNA sequence having at least 75% identity to a sequence selected from SEQ ID NOs: 2880-2904. In some embodiments, the at least one guide RNA has a crRNA sequence having at least 80% identity to a sequence selected from SEQ ID NOs: 2880-2904. In some embodiments, the at least one guide RNA has a crRNA sequence having at least 85% identity to a sequence selected from SEQ ID NOs: 2880-2904. In some embodiments, the at least one guide RNA has a crRNA sequence having at least 90% identity to a sequence selected from SEQ ID NOs: 2880-2904. In some embodiments, the at least one guide RNA has a crRNA sequence having at least 95% identity to a sequence selected from SEQ ID NOs: 2880-2904. In some embodiments, the at least one guide RNA has a crRNA sequence selected from SEQ ID NOs: 2880-2904.

[0491] In some embodiments, the present disclosure provides method for the treatment or prevention of a joint disease or condition in a subject in need thereof. The method includes administering, to a joint of the subject, a pharmaceutical composition including a pharmaceutically effective amount of a composition having one or more nucleic acids encoding a Clustered Regularly Interspaced Short Palindromic Repeats (CRISPR) gene-editing system. The system includes a CRISPR Associated Protein 9 (Cas9) protein, and at least one guide RNA targeting an APOBEC3D gene, wherein the target sequence is adjacent to a protospacer adjacent motif (PAM) sequence for the Cas9 protein. In some embodiments, the at least one guide RNA includes a crRNA sequence that is complementary to a target sequence in any one of exons of the APOBEC3D gene. In some embodiments, the at least one guide RNA includes a crRNA sequence that is complementary to a target sequence in one of exons disclosed herein of the APOBEC3D gene. In some embodiments, the at least one guide RNA has a crRNA sequence having at least 75% identity to a sequence selected from SEQ ID NOs: 2880-2904. In some embodiments, the at least one guide RNA has a crRNA sequence having at least 80% identity to a sequence selected from SEQ ID NOs: 2880-2904. In some embodiments, the at least one guide RNA has a crRNA sequence having at least 85% identity to a sequence selected from SEQ ID NOs: 2880-2904. In some embodiments, the at least one guide RNA has a crRNA sequence having at least 90% identity to a sequence selected from SEQ ID NOs: 2880-2904. In some embodiments, the at least one guide RNA has a crRNA sequence having at least 95% identity to a sequence selected from SEQ ID NOs: 2880-2904. In some embodiments, the at least one guide RNA has a crRNA sequence selected from SEQ ID NOs: 2880-2904. In some embodiments, the joint disease or condition is arthritis, e.g., osteoarthritis. In some embodiments, the administering includes intra-articular injection of the pharmaceutical composition into the joint of the subject.

[0492] In some embodiments, the present disclosure provides a pharmaceutical composition for the treatment or prevention of a joint disease or condition, the composition including a therapeutically effective amount of one or more nucleic acids encoding a Clustered Regularly Interspaced Short Palindromic Repeats (CRISPR) gene-editing system. The system includes a CRISPR Associated Protein 9 (Cas9) protein, and at least one guide RNA targeting an APOBEC3F gene, wherein the target sequence is adjacent to a protospacer adjacent motif (PAM) sequence for the Cas9 protein. In some embodiments, the at least one guide RNA includes a crRNA sequence that is complementary to a target sequence in any one of exons of the APOBEC3F gene. In some embodiments, the at least one guide RNA includes a crRNA sequence that is complementary to a target sequence in one of exons disclosed herein of the APOBEC3F gene. In some embodiments, the at least one guide RNA has a crRNA sequence having at least 75% identity to a sequence selected from SEQ ID NOs: 2905-2929. In some embodiments, the at least one guide RNA has a crRNA sequence having at least 80% identity to a sequence selected from SEQ ID NOs: 2905-2929. In some embodiments, the at least one guide RNA has a crRNA sequence having at least 85% identity to a sequence selected from SEQ ID NOs: 2905-2929. In some embodiments, the at least one guide RNA has a crRNA sequence having at least 90% identity to a sequence selected from SEQ ID NOs: 2905-2929. In some embodiments, the at least one guide RNA has a crRNA sequence having at least 95% identity to a sequence selected from SEQ ID NOs: 2905-2929. In some embodiments, the at least one guide RNA has a crRNA sequence selected from SEQ ID NOs: 2905-2929.

[0493] In some embodiments, the present disclosure provides method for the treatment or prevention of a joint disease or condition in a subject in need thereof. The method includes administering, to a joint of the subject, a pharmaceutical composition including a pharmaceutically effective amount of a composition having one or more nucleic acids encoding a Clustered Regularly Interspaced Short Palindromic Repeats (CRISPR) gene-editing system. The system includes a CRISPR Associated Protein 9 (Cas9) protein, and at least one guide RNA targeting an APOBEC3F gene, wherein the target sequence is adjacent to a protospacer adjacent motif (PAM) sequence for the Cas9 protein. In some embodiments, the at least one guide RNA includes a crRNA sequence that is complementary to a target sequence in any one of exons of the APOBEC3F gene. In some embodiments, the at least one guide RNA includes a crRNA sequence that is complementary to a target sequence in one of exons disclosed herein of the APOBEC3F gene. In some embodiments, the at least one guide RNA has a crRNA sequence having at least 75% identity to a sequence selected from SEQ ID NOs: 2905-2929. In some embodiments, the at least one guide RNA has a crRNA sequence having at least 80% identity to a sequence selected from SEQ ID NOs: 2905-2929. In some embodiments, the at least one guide RNA has a crRNA sequence having at least 85% identity to a sequence selected from SEQ ID NOs: 2905-2929. In some embodiments, the at least one guide RNA has a crRNA sequence having at least 90% identity to a sequence selected from SEQ ID NOs: 2905-2929. In some embodiments, the at least one guide RNA has a crRNA sequence having at least 95% identity to a sequence selected from SEQ ID NOs: 2905-2929. In some embodiments, the at least one guide RNA has a crRNA sequence selected from SEQ ID NOs: 2905-2929. In some embodiments, the joint disease or condition is arthritis, e.g., osteoarthritis. In some embodiments, the administering includes intra-articular injection of the pharmaceutical composition into the joint of the subject.

[0494] In some embodiments, the present disclosure provides a pharmaceutical composition for the treatment or prevention of a joint disease or condition, the composition including a therapeutically effective amount of one or more nucleic acids encoding a Clustered Regularly Interspaced Short Palindromic Repeats (CRISPR) gene-editing system. The system includes a CRISPR Associated Protein 9 (Cas9) protein, and at least one guide RNA targeting an APOBEC3G gene, wherein the target sequence is adjacent to a protospacer adjacent motif (PAM) sequence for the Cas9 protein. In some embodiments, the at least one guide RNA includes a crRNA sequence that is complementary to a target sequence in any one of exons of the APOBEC3G gene. In some embodiments, the at least one guide RNA includes a crRNA sequence that is complementary to a target sequence in one of exons disclosed herein of the APOBEC3G gene. In some embodiments, the at least one guide RNA has a crRNA sequence having at least 75% identity to a sequence selected from SEQ ID NOs: 2930-2954. In some embodiments, the at least one guide RNA has a crRNA sequence having at least 80% identity to a sequence selected from SEQ ID NOs: 2930-2954. In some embodiments, the at least one guide RNA has a crRNA sequence having at least 85% identity to a sequence selected from SEQ ID NOs: 2930-2954. In some embodiments, the at least one guide RNA has a crRNA sequence having at least 90% identity to a sequence selected from SEQ ID NOs: 2930-2954. In some embodiments, the at least one guide RNA has a crRNA sequence having at least 95% identity to a sequence selected from SEQ ID NOs: 2930-2954. In some embodiments, the at least one guide RNA has a crRNA sequence selected from SEQ ID NOs: 2930-2954.

[0495] In some embodiments, the present disclosure provides method for the treatment or prevention of a joint disease or condition in a subject in need thereof. The method includes administering, to a joint of the subject, a pharmaceutical composition including a pharmaceutically effective amount of a composition having one or more nucleic acids encoding a Clustered Regularly Interspaced Short Palindromic Repeats (CRISPR) gene-editing system. The system includes a CRISPR Associated Protein 9 (Cas9) protein, and at least one guide RNA targeting an APOBEC3G gene, wherein the target sequence is adjacent to a protospacer adjacent motif (PAM) sequence for the Cas9 protein. In some embodiments, the at least one guide RNA includes a crRNA sequence that is complementary to a target sequence in any one of exons of the APOBEC3G gene. In some embodiments, the at least one guide RNA includes a crRNA sequence that is complementary to a target sequence in one of exons disclosed herein of the APOBEC3G gene. In some embodiments, the at least one guide RNA has a crRNA sequence having at least 75% identity to a sequence selected from SEQ ID NOs: 2930-2954. In some embodiments, the at least one guide RNA has a crRNA sequence having at least 80% identity to a sequence selected from SEQ ID NOs: 2930-2954. In some embodiments, the at least one guide RNA has a crRNA sequence having at least 85% identity to a sequence selected from SEQ ID NOs: 2930-2954. In some embodiments, the at least one guide RNA has a crRNA sequence having at least 90% identity to a sequence selected from SEQ ID NOs: 2930-2954. In some embodiments, the at least one guide RNA has a crRNA sequence having at least 95% identity to a sequence selected from SEQ ID NOs: 2930-2954. In some embodiments, the at least one guide RNA has a crRNA sequence selected from SEQ ID NOs: 2930-2954. In some embodiments, the joint disease or condition is arthritis, e.g., osteoarthritis. In some embodiments, the administering includes intra-articular injection of the pharmaceutical composition into the joint of the subject.

[0496] In some embodiments, the present disclosure provides a pharmaceutical composition for the treatment or prevention of a joint disease or condition, the composition including a therapeutically effective amount of one or more nucleic acids encoding a Clustered Regularly Interspaced Short Palindromic Repeats (CRISPR) gene-editing system. The system includes a CRISPR Associated Protein 9 (Cas9) protein, and at least one guide RNA targeting an APOBEC3H gene, wherein the target sequence is adjacent to a protospacer adjacent motif (PAM) sequence for the Cas9 protein. In some embodiments, the at least one guide RNA includes a crRNA sequence that is complementary to a target sequence in any one of exons of the APOBEC3H gene. In some embodiments, the at least one guide RNA includes a crRNA sequence that is complementary to a target sequence in one of exons disclosed herein of the APOBEC3H gene. In some embodiments, the at least one guide RNA has a crRNA sequence having at least 75% identity to a sequence selected from SEQ ID NOs: 2955-2979. In some embodiments, the at least one guide RNA has a crRNA sequence having at least 80% identity to a sequence selected from SEQ ID NOs: 2955-2979. In some embodiments, the at least one guide RNA has a crRNA sequence having at least 85% identity to a sequence selected from SEQ ID NOs: 2955-2979. In some embodiments, the at least one guide RNA has a crRNA sequence having at least 90% identity to a sequence selected from SEQ ID NOs: 2955-2979. In some embodiments, the at least one guide RNA has a crRNA sequence having at least 95% identity to a sequence selected from SEQ ID NOs: 2955-2979. In some embodiments, the at least one guide RNA has a crRNA sequence selected from SEQ ID NOs: 2955-2979.

[0497] In some embodiments, the present disclosure provides method for the treatment or prevention of a joint disease or condition in a subject in need thereof. The method includes administering, to a joint of the subject, a pharmaceutical composition including a pharmaceutically effective amount of a composition having one or more nucleic acids encoding a Clustered Regularly Interspaced Short Palindromic Repeats (CRISPR) gene-editing system. The system includes a CRISPR Associated Protein 9 (Cas9) protein, and at least one guide RNA targeting an APOBEC3H gene, wherein the target sequence is adjacent to a protospacer adjacent motif (PAM) sequence for the Cas9 protein. In some embodiments, the at least one guide RNA includes a crRNA sequence that is complementary to a target sequence in any one of exons of the APOBEC3H gene. In some embodiments, the at least one guide RNA includes a crRNA sequence that is complementary to a target sequence in one of exons disclosed herein of the APOBEC3H gene. In some embodiments, the at least one guide RNA has a crRNA sequence having at least 75% identity to a sequence selected from SEQ ID NOs: 2955-2979. In some embodiments, the at least one guide RNA has a crRNA sequence having at least 80% identity to a sequence selected from SEQ ID NOs: 2955-2979. In some embodiments, the at least one guide RNA has a crRNA sequence having at least 85% identity to a sequence selected from SEQ ID NOs: 2955-2979. In some embodiments, the at least one guide RNA has a crRNA sequence having at least 90% identity to a sequence selected from SEQ ID NOs: 2955-2979. In some embodiments, the at least one guide RNA has a crRNA sequence having at least 95% identity to a sequence selected from SEQ ID NOs: 2955-2979. In some embodiments, the at least one guide RNA has a crRNA sequence selected from SEQ ID NOs: 2955-2979. In some embodiments, the joint disease or condition is arthritis, e.g., osteoarthritis. In some embodiments, the administering includes intra-articular injection of the pharmaceutical composition into the joint of the subject.

[0498] In some embodiments, the present disclosure provides a pharmaceutical composition for the treatment or prevention of a joint disease or condition, the composition including a therapeutically effective amount of one or more nucleic acids encoding a Clustered Regularly Interspaced Short Palindromic Repeats (CRISPR) gene-editing system. The system includes a CRISPR Associated Protein 9 (Cas9) protein, and at least one guide RNA targeting an ARRB2 gene, wherein the target sequence is adjacent to a protospacer adjacent motif (PAM) sequence for the Cas9 protein. In some embodiments, the at least one guide RNA includes a crRNA sequence that is complementary to a target sequence in any one of exons of the ARRB2 gene. In some embodiments, the at least one guide RNA includes a crRNA sequence that is complementary to a target sequence in one of exons disclosed herein of the ARRB2 gene. In some embodiments, the at least one guide RNA has a crRNA sequence having at least 75% identity to a sequence selected from SEQ ID NOs: 2980-3004. In some embodiments, the at least one guide RNA has a crRNA sequence having at least 80% identity to a sequence selected from SEQ ID NOs: 2980-3004. In some embodiments, the at least one guide RNA has a crRNA sequence having at least 85% identity to a sequence selected from SEQ ID NOs: 2980-3004. In some embodiments, the at least one guide RNA has a crRNA sequence having at least 90% identity to a sequence selected from SEQ ID NOs: 2980-3004. In some embodiments, the at least one guide RNA has a crRNA sequence having at least 95% identity to a sequence selected from SEQ ID NOs: 2980-3004. In some embodiments, the at least one guide RNA has a crRNA sequence selected from SEQ ID NOs: 2980-3004.

[0499] In some embodiments, the present disclosure provides method for the treatment or prevention of a joint disease or condition in a subject in need thereof. The method includes administering, to a joint of the subject, a pharmaceutical composition including a pharmaceutically effective amount of a composition having one or more nucleic acids encoding a Clustered Regularly Interspaced Short Palindromic Repeats (CRISPR) gene-editing system. The system includes a CRISPR Associated Protein 9 (Cas9) protein, and at least one guide RNA targeting an ARRB2 gene, wherein the target sequence is adjacent to a protospacer adjacent motif (PAM) sequence for the Cas9 protein. In some embodiments, the at least one guide RNA includes a crRNA sequence that is complementary to a target sequence in any one of exons of the ARRB2 gene. In some embodiments, the at least one guide RNA includes a crRNA sequence that is complementary to a target sequence in one of exons disclosed herein of the ARRB2 gene. In some embodiments, the at least one guide RNA has a crRNA sequence having at least 75% identity to a sequence selected from SEQ ID NOs: 2980-3004. In some embodiments, the at least one guide RNA has a crRNA sequence having at least 80% identity to a sequence selected from SEQ ID NOs: 2980-3004. In some embodiments, the at least one guide RNA has a crRNA sequence having at least 85% identity to a sequence selected from SEQ ID NOs: 2980-3004. In some embodiments, the at least one guide RNA has a crRNA sequence having at least 90% identity to a sequence selected from SEQ ID NOs: 2980-3004. In some embodiments, the at least one guide RNA has a crRNA sequence having at least 95% identity to a sequence selected from SEQ ID NOs: 2980-3004. In some embodiments, the at least one guide RNA has a crRNA sequence selected from SEQ ID NOs: 2980-3004. In some embodiments, the joint disease or condition is arthritis, e.g., osteoarthritis. In some embodiments, the administering includes intra-articular injection of the pharmaceutical composition into the joint of the subject.

[0500] In some embodiments, the present disclosure provides a pharmaceutical composition for the treatment or prevention of a joint disease or condition, the composition including a therapeutically effective amount of one or more nucleic acids encoding a Clustered Regularly Interspaced Short Palindromic Repeats (CRISPR) gene-editing system. The system includes a CRISPR Associated Protein 9 (Cas9) protein, and at least one guide RNA targeting an B2M gene, wherein the target sequence is adjacent to a protospacer adjacent motif (PAM) sequence for the Cas9 protein. In some embodiments, the at least one guide RNA includes a crRNA sequence that is complementary to a target sequence in any one of exons of the B2M gene. In some embodiments, the at least one guide RNA includes a crRNA sequence that is complementary to a target sequence in one of exons disclosed herein of the B2M gene. In some embodiments, the at least one guide RNA has a crRNA sequence having at least 75% identity to a sequence selected from SEQ ID NOs: 3005-3029. In some embodiments, the at least one guide RNA has a crRNA sequence having at least 80% identity to a sequence selected from SEQ ID NOs: 3005-3029. In some embodiments, the at least one guide RNA has a crRNA sequence having at least 85% identity to a sequence selected from SEQ ID NOs: 3005-3029. In some embodiments, the at least one guide RNA has a crRNA sequence having at least 90% identity to a sequence selected from SEQ ID NOs: 3005-3029. In some embodiments, the at least one guide RNA has a crRNA sequence having at least 95% identity to a sequence selected from SEQ ID NOs: 3005-3029. In some embodiments, the at least one guide RNA has a crRNA sequence selected from SEQ ID NOs: 3005-3029.

[0501] In some embodiments, the present disclosure provides method for the treatment or prevention of a joint disease or condition in a subject in need thereof. The method includes administering, to a joint of the subject, a pharmaceutical composition including a pharmaceutically effective amount of a composition having one or more nucleic acids encoding a Clustered Regularly Interspaced Short Palindromic Repeats (CRISPR) gene-editing system. The system includes a CRISPR Associated Protein 9 (Cas9) protein, and at least one guide RNA targeting an B2M gene, wherein the target sequence is adjacent to a protospacer adjacent motif (PAM) sequence for the Cas9 protein. In some embodiments, the at least one guide RNA includes a crRNA sequence that is complementary to a target sequence in any one of exons of the B2M gene. In some embodiments, the at least one guide RNA includes a crRNA sequence that is complementary to a target sequence in one of exons disclosed herein of the B2M gene. In some embodiments, the at least one guide RNA has a crRNA sequence having at least 75% identity to a sequence selected from SEQ ID NOs: 3005-3029. In some embodiments, the at least one guide RNA has a crRNA sequence having at least 80% identity to a sequence selected from SEQ ID NOs: 3005-3029. In some embodiments, the at least one guide RNA has a crRNA sequence having at least 85% identity to a sequence selected from SEQ ID NOs: 3005-3029. In some embodiments, the at least one guide RNA has a crRNA sequence having at least 90% identity to a sequence selected from SEQ ID NOs: 3005-3029. In some embodiments, the at least one guide RNA has a crRNA sequence having at least 95% identity to a sequence selected from SEQ ID NOs: 3005-3029. In some embodiments, the at least one guide RNA has a crRNA sequence selected from SEQ ID NOs: 3005-3029. In some embodiments, the joint disease or condition is arthritis, e.g., osteoarthritis. In some embodiments, the administering includes intra-articular injection of the pharmaceutical composition into the joint of the subject.

[0502] In some embodiments, the present disclosure provides a pharmaceutical composition for the treatment or prevention of a joint disease or condition, the composition including a therapeutically effective amount of one or more nucleic acids encoding a Clustered Regularly Interspaced Short Palindromic Repeats (CRISPR) gene-editing system. The system includes a CRISPR Associated Protein 9 (Cas9) protein, and at least one guide RNA targeting an BCAS3 gene, wherein the target sequence is adjacent to a protospacer adjacent motif (PAM) sequence for the Cas9 protein. In some embodiments, the at least one guide RNA includes a crRNA sequence that is complementary to a target sequence in any one of exons of the BCAS3 gene. In some embodiments, the at least one guide RNA includes a crRNA sequence that is complementary to a target sequence in one of exons disclosed herein of the BCAS3 gene. In some embodiments, the at least one guide RNA has a crRNA sequence having at least 75% identity to a sequence selected from SEQ ID NOs: 3030-3054. In some embodiments, the at least one guide RNA has a crRNA sequence having at least 80% identity to a sequence selected from SEQ ID NOs: 3030-3054. In some embodiments, the at least one guide RNA has a crRNA sequence having at least 85% identity to a sequence selected from SEQ ID NOs: 3030-3054. In some embodiments, the at least one guide RNA has a crRNA sequence having at least 90% identity to a sequence selected from SEQ ID NOs: 3030-3054. In some embodiments, the at least one guide RNA has a crRNA sequence having at least 95% identity to a sequence selected from SEQ ID NOs: 3030-3054. In some embodiments, the at least one guide RNA has a crRNA sequence selected from SEQ ID NOs: 3030-3054.

[0503] In some embodiments, the present disclosure provides method for the treatment or prevention of a joint disease or condition in a subject in need thereof. The method includes administering, to a joint of the subject, a pharmaceutical composition including a pharmaceutically effective amount of a composition having one or more nucleic acids encoding a Clustered Regularly Interspaced Short Palindromic Repeats (CRISPR) gene-editing system. The system includes a CRISPR Associated Protein 9 (Cas9) protein, and at least one guide RNA targeting an BCAS3 gene, wherein the target sequence is adjacent to a protospacer adjacent motif (PAM) sequence for the Cas9 protein. In some embodiments, the at least one guide RNA includes a crRNA sequence that is complementary to a target sequence in any one of exons of the BCAS3 gene. In some embodiments, the at least one guide RNA includes a crRNA sequence that is complementary to a target sequence in one of exons disclosed herein of the BCAS3 gene. In some embodiments, the at least one guide RNA has a crRNA sequence having at least 75% identity to a sequence selected from SEQ ID NOs: 3030-3054. In some embodiments, the at least one guide RNA has a crRNA sequence having at least 80% identity to a sequence selected from SEQ ID NOs: 3030-3054. In some embodiments, the at least one guide RNA has a crRNA sequence having at least 85% identity to a sequence selected from SEQ ID NOs: 3030-3054. In some embodiments, the at least one guide RNA has a crRNA sequence having at least 90% identity to a sequence selected from SEQ ID NOs: 3030-3054. In some embodiments, the at least one guide RNA has a crRNA sequence having at least 95% identity to a sequence selected from SEQ ID NOs: 3030-3054. In some embodiments, the at least one guide RNA has a crRNA sequence selected from SEQ ID NOs: 3030-3054. In some embodiments, the joint disease or condition is arthritis, e.g., osteoarthritis. In some embodiments, the administering includes intra-articular injection of the pharmaceutical composition into the joint of the subject.

[0504] In some embodiments, the present disclosure provides a pharmaceutical composition for the treatment or prevention of a joint disease or condition, the composition including a therapeutically effective amount of one or more nucleic acids encoding a Clustered Regularly Interspaced Short Palindromic Repeats (CRISPR) gene-editing system. The system includes a CRISPR Associated Protein 9 (Cas9) protein, and at least one guide RNA targeting an BMP4 gene, wherein the target sequence is adjacent to a protospacer adjacent motif (PAM) sequence for the Cas9 protein. In some embodiments, the at least one guide RNA includes a crRNA sequence that is complementary to a target sequence in any one of exons of the BMP4 gene. In some embodiments, the at least one guide RNA includes a crRNA sequence that is complementary to a target sequence in one of exons disclosed herein of the BMP4 gene. In some embodiments, the at least one guide RNA has a crRNA sequence having at least 75% identity to a sequence selected from SEQ ID NOs: 3055-3079. In some embodiments, the at least one guide RNA has a crRNA sequence having at least 80% identity to a sequence selected from SEQ ID NOs: 3055-3079. In some embodiments, the at least one guide RNA has a crRNA sequence having at least 85% identity to a sequence selected from SEQ ID NOs: 3055-3079. In some embodiments, the at least one guide RNA has a crRNA sequence having at least 90% identity to a sequence selected from SEQ ID NOs: 3055-3079. In some embodiments, the at least one guide RNA has a crRNA sequence having at least 95% identity to a sequence selected from SEQ ID NOs: 3055-3079. In some embodiments, the at least one guide RNA has a crRNA sequence selected from SEQ ID NOs: 3055-3079.

[0505] In some embodiments, the present disclosure provides method for the treatment or prevention of a joint disease or condition in a subject in need thereof. The method includes administering, to a joint of the subject, a pharmaceutical composition including a pharmaceutically effective amount of a composition having one or more nucleic acids encoding a Clustered Regularly Interspaced Short Palindromic Repeats (CRISPR) gene-editing system. The system includes a CRISPR Associated Protein 9 (Cas9) protein, and at least one guide RNA targeting an BMP4 gene, wherein the target sequence is adjacent to a protospacer adjacent motif (PAM) sequence for the Cas9 protein. In some embodiments, the at least one guide RNA includes a crRNA sequence that is complementary to a target sequence in any one of exons of the BMP4 gene. In some embodiments, the at least one guide RNA includes a crRNA sequence that is complementary to a target sequence in one of exons disclosed herein of the BMP4 gene. In some embodiments, the at least one guide RNA has a crRNA sequence having at least 75% identity to a sequence selected from SEQ ID NOs: 3055-3079. In some embodiments, the at least one guide RNA has a crRNA sequence having at least 80% identity to a sequence selected from SEQ ID NOs: 3055-3079. In some embodiments, the at least one guide RNA has a crRNA sequence having at least 85% identity to a sequence selected from SEQ ID NOs: 3055-3079. In some embodiments, the at least one guide RNA has a crRNA sequence having at least 90% identity to a sequence selected from SEQ ID NOs: 3055-3079. In some embodiments, the at least one guide RNA has a crRNA sequence having at least 95% identity to a sequence selected from SEQ ID NOs: 3055-3079. In some embodiments, the at least one guide RNA has a crRNA sequence selected from SEQ ID NOs: 3055-3079. In some embodiments, the joint disease or condition is arthritis, e.g., osteoarthritis. In some embodiments, the administering includes intra-articular injection of the pharmaceutical composition into the joint of the subject.

[0506] In some embodiments, the present disclosure provides a pharmaceutical composition for the treatment or prevention of a joint disease or condition, the composition including a therapeutically effective amount of one or more nucleic acids encoding a Clustered Regularly Interspaced Short Palindromic Repeats (CRISPR) gene-editing system. The system includes a CRISPR Associated Protein 9 (Cas9) protein, and at least one guide RNA targeting an BORCS7 gene, wherein the target sequence is adjacent to a protospacer adjacent motif (PAM) sequence for the Cas9 protein. In some embodiments, the at least one guide RNA includes a crRNA sequence that is complementary to a target sequence in any one of exons of the BORCS7 gene. In some embodiments, the at least one guide RNA includes a crRNA sequence that is complementary to a target sequence in one of exons disclosed herein of the BORCS7 gene. In some embodiments, the at least one guide RNA has a crRNA sequence having at least 75% identity to a sequence selected from SEQ ID NOs: 3080-3104. In some embodiments, the at least one guide RNA has a crRNA sequence having at least 80% identity to a sequence selected from SEQ ID NOs: 3080-3104. In some embodiments, the at least one guide RNA has a crRNA sequence having at least 85% identity to a sequence selected from SEQ ID NOs: 3080-3104. In some embodiments, the at least one guide RNA has a crRNA sequence having at least 90% identity to a sequence selected from SEQ ID NOs: 3080-3104. In some embodiments, the at least one guide RNA has a crRNA sequence having at least 95% identity to a sequence selected from SEQ ID NOs: 3080-3104. In some embodiments, the at least one guide RNA has a crRNA sequence selected from SEQ ID NOs: 3080-3104.

[0507] In some embodiments, the present disclosure provides method for the treatment or prevention of a joint disease or condition in a subject in need thereof. The method includes administering, to a joint of the subject, a pharmaceutical composition including a pharmaceutically effective amount of a composition having one or more nucleic acids encoding a Clustered Regularly Interspaced Short Palindromic Repeats (CRISPR) gene-editing system. The system includes a CRISPR Associated Protein 9 (Cas9) protein, and at least one guide RNA targeting an BORCS7 gene, wherein the target sequence is adjacent to a protospacer adjacent motif (PAM) sequence for the Cas9 protein. In some embodiments, the at least one guide RNA includes a crRNA sequence that is complementary to a target sequence in any one of exons of the BORCS7 gene. In some embodiments, the at least one guide RNA includes a crRNA sequence that is complementary to a target sequence in one of exons disclosed herein of the BORCS7 gene. In some embodiments, the at least one guide RNA has a crRNA sequence having at least 75% identity to a sequence selected from SEQ ID NOs: 3080-3104. In some embodiments, the at least one guide RNA has a crRNA sequence having at least 80% identity to a sequence selected from SEQ ID NOs: 3080-3104. In some embodiments, the at least one guide RNA has a crRNA sequence having at least 85% identity to a sequence selected from SEQ ID NOs: 3080-3104. In some embodiments, the at least one guide RNA has a crRNA sequence having at least 90% identity to a sequence selected from SEQ ID NOs: 3080-3104. In some embodiments, the at least one guide RNA has a crRNA sequence having at least 95% identity to a sequence selected from SEQ ID NOs: 3080-3104. In some embodiments, the at least one guide RNA has a crRNA sequence selected from SEQ ID NOs: 3080-3104. In some embodiments, the joint disease or condition is arthritis, e.g., osteoarthritis. In some embodiments, the administering includes intra-articular injection of the pharmaceutical composition into the joint of the subject.

[0508] In some embodiments, the present disclosure provides a pharmaceutical composition for the treatment or prevention of a joint disease or condition, the composition including a therapeutically effective amount of one or more nucleic acids encoding a Clustered Regularly Interspaced Short Palindromic Repeats (CRISPR) gene-editing system. The system includes a CRISPR Associated Protein 9 (Cas9) protein, and at least one guide RNA targeting an GATD3A gene, wherein the target sequence is adjacent to a protospacer adjacent motif (PAM) sequence for the Cas9 protein. In some embodiments, the at least one guide RNA includes a crRNA sequence that is complementary to a target sequence in any one of exons of the GATD3A gene. In some embodiments, the at least one guide RNA includes a crRNA sequence that is complementary to a target sequence in one of exons disclosed herein of the GATD3A gene. In some embodiments, the at least one guide RNA has a crRNA sequence having at least 75% identity to a sequence selected from SEQ ID NOs: 3105-3129. In some embodiments, the at least one guide RNA has a crRNA sequence having at least 80% identity to a sequence selected from SEQ ID NOs: 3105-3129. In some embodiments, the at least one guide RNA has a crRNA sequence having at least 85% identity to a sequence selected from SEQ ID NOs: 3105-3129. In some embodiments, the at least one guide RNA has a crRNA sequence having at least 90% identity to a sequence selected from SEQ ID NOs: 3105-3129. In some embodiments, the at least one guide RNA has a crRNA sequence having at least 95% identity to a sequence selected from SEQ ID NOs: 3105-3129. In some embodiments, the at least one guide RNA has a crRNA sequence selected from SEQ ID NOs: 3105-3129.

[0509] In some embodiments, the present disclosure provides method for the treatment or prevention of a joint disease or condition in a subject in need thereof. The method includes administering, to a joint of the subject, a pharmaceutical composition including a pharmaceutically effective amount of a composition having one or more nucleic acids encoding a Clustered Regularly Interspaced Short Palindromic Repeats (CRISPR) gene-editing system. The system includes a CRISPR Associated Protein 9 (Cas9) protein, and at least one guide RNA targeting an GATD3A gene, wherein the target sequence is adjacent to a protospacer adjacent motif (PAM) sequence for the Cas9 protein. In some embodiments, the at least one guide RNA includes a crRNA sequence that is complementary to a target sequence in any one of exons of the GATD3A gene. In some embodiments, the at least one guide RNA includes a crRNA sequence that is complementary to a target sequence in one of exons disclosed herein of the GATD3A gene. In some embodiments, the at least one guide RNA has a crRNA sequence having at least 75% identity to a sequence selected from SEQ ID NOs: 3105-3129. In some embodiments, the at least one guide RNA has a crRNA sequence having at least 80% identity to a sequence selected from SEQ ID NOs: 3105-3129. In some embodiments, the at least one guide RNA has a crRNA sequence having at least 85% identity to a sequence selected from SEQ ID NOs: 3105-3129. In some embodiments, the at least one guide RNA has a crRNA sequence having at least 90% identity to a sequence selected from SEQ ID NOs: 3105-3129. In some embodiments, the at least one guide RNA has a crRNA sequence having at least 95% identity to a sequence selected from SEQ ID NOs: 3105-3129. In some embodiments, the at least one guide RNA has a crRNA sequence selected from SEQ ID NOs: 3105-3129. In some embodiments, the joint disease or condition is arthritis, e.g., osteoarthritis. In some embodiments, the administering includes intra-articular injection of the pharmaceutical composition into the joint of the subject.

[0510] In some embodiments, the present disclosure provides a pharmaceutical composition for the treatment or prevention of a joint disease or condition, the composition including a therapeutically effective amount of one or more nucleic acids encoding a Clustered Regularly Interspaced Short Palindromic Repeats (CRISPR) gene-editing system. The system includes a CRISPR Associated Protein 9 (Cas9) protein, and at least one guide RNA targeting an GATD3B gene, wherein the target sequence is adjacent to a protospacer adjacent motif (PAM) sequence for the Cas9 protein. In some embodiments, the at least one guide RNA includes a crRNA sequence that is complementary to a target sequence in any one of exons of the GATD3B gene. In some embodiments, the at least one guide RNA includes a crRNA sequence that is complementary to a target sequence in one of exons disclosed herein of the GATD3B gene. In some embodiments, the at least one guide RNA has a crRNA sequence having at least 75% identity to a sequence selected from SEQ ID NOs: 3130-3154. In some embodiments, the at least one guide RNA has a crRNA sequence having at least 80% identity to a sequence selected from SEQ ID NOs: 3130-3154. In some embodiments, the at least one guide RNA has a crRNA sequence having at least 85% identity to a sequence selected from SEQ ID NOs: 3130-3154. In some embodiments, the at least one guide RNA has a crRNA sequence having at least 90% identity to a sequence selected from SEQ ID NOs: 3130-3154. In some embodiments, the at least one guide RNA has a crRNA sequence having at least 95% identity to a sequence selected from SEQ ID NOs: 3130-3154. In some embodiments, the at least one guide RNA has a crRNA sequence selected from SEQ ID NOs: 3130-3154.

[0511] In some embodiments, the present disclosure provides method for the treatment or prevention of a joint disease or condition in a subject in need thereof. The method includes administering, to a joint of the subject, a pharmaceutical composition including a pharmaceutically effective amount of a composition having one or more nucleic acids encoding a Clustered Regularly Interspaced Short Palindromic Repeats (CRISPR) gene-editing system. The system includes a CRISPR Associated Protein 9 (Cas9) protein, and at least one guide RNA targeting an GATD3B gene, wherein the target sequence is adjacent to a protospacer adjacent motif (PAM) sequence for the Cas9 protein. In some embodiments, the at least one guide RNA includes a crRNA sequence that is complementary to a target sequence in any one of exons of the GATD3B gene. In some embodiments, the at least one guide RNA includes a crRNA sequence that is complementary to a target sequence in one of exons disclosed herein of the GATD3B gene. In some embodiments, the at least one guide RNA has a crRNA sequence having at least 75% identity to a sequence selected from SEQ ID NOs: 3130-3154. In some embodiments, the at least one guide RNA has a crRNA sequence having at least 80% identity to a sequence selected from SEQ ID NOs: 3130-3154. In some embodiments, the at least one guide RNA has a crRNA sequence having at least 85% identity to a sequence selected from SEQ ID NOs: 3130-3154. In some embodiments, the at least one guide RNA has a crRNA sequence having at least 90% identity to a sequence selected from SEQ ID NOs: 3130-3154. In some embodiments, the at least one guide RNA has a crRNA sequence having at least 95% identity to a sequence selected from SEQ ID NOs: 3130-3154. In some embodiments, the at least one guide RNA has a crRNA sequence selected from SEQ ID NOs: 3130-3154. In some embodiments, the joint disease or condition is arthritis, e.g., osteoarthritis. In some embodiments, the administering includes intra-articular injection of the pharmaceutical composition into the joint of the subject.

[0512] In some embodiments, the present disclosure provides a pharmaceutical composition for the treatment or prevention of a joint disease or condition, the composition including a therapeutically effective amount of one or more nucleic acids encoding a Clustered Regularly Interspaced Short Palindromic Repeats (CRISPR) gene-editing system. The system includes a CRISPR Associated Protein 9 (Cas9) protein, and at least one guide RNA targeting an CASP1 gene, wherein the target sequence is adjacent to a protospacer adjacent motif (PAM) sequence for the Cas9 protein. In some embodiments, the at least one guide RNA includes a crRNA sequence that is complementary to a target sequence in any one of exons of the CASP1 gene. In some embodiments, the at least one guide RNA includes a crRNA sequence that is complementary to a target sequence in one of exons disclosed herein of the CASP1 gene. In some embodiments, the at least one guide RNA has a crRNA sequence having at least 75% identity to a sequence selected from SEQ ID NOs: 3155-3179. In some embodiments, the at least one guide RNA has a crRNA sequence having at least 80% identity to a sequence selected from SEQ ID NOs: 3155-3179. In some embodiments, the at least one guide RNA has a crRNA sequence having at least 85% identity to a sequence selected from SEQ ID NOs: 3155-3179. In some embodiments, the at least one guide RNA has a crRNA sequence having at least 90% identity to a sequence selected from SEQ ID NOs: 3155-3179. In some embodiments, the at least one guide RNA has a crRNA sequence having at least 95% identity to a sequence selected from SEQ ID NOs: 3155-3179. In some embodiments, the at least one guide RNA has a crRNA sequence selected from SEQ ID NOs: 3155-3179.

[0513] In some embodiments, the present disclosure provides method for the treatment or prevention of a joint disease or condition in a subject in need thereof. The method includes administering, to a joint of the subject, a pharmaceutical composition including a pharmaceutically effective amount of a composition having one or more nucleic acids encoding a Clustered Regularly Interspaced Short Palindromic Repeats (CRISPR) gene-editing system. The system includes a CRISPR Associated Protein 9 (Cas9) protein, and at least one guide RNA targeting an CASP1 gene, wherein the target sequence is adjacent to a protospacer adjacent motif (PAM) sequence for the Cas9 protein. In some embodiments, the at least one guide RNA includes a crRNA sequence that is complementary to a target sequence in any one of exons of the CASP1 gene. In some embodiments, the at least one guide RNA includes a crRNA sequence that is complementary to a target sequence in one of exons disclosed herein of the CASP1 gene. In some embodiments, the at least one guide RNA has a crRNA sequence having at least 75% identity to a sequence selected from SEQ ID NOs: 3155-3179. In some embodiments, the at least one guide RNA has a crRNA sequence having at least 80% identity to a sequence selected from SEQ ID NOs: 3155-3179. In some embodiments, the at least one guide RNA has a crRNA sequence having at least 85% identity to a sequence selected from SEQ ID NOs: 3155-3179. In some embodiments, the at least one guide RNA has a crRNA sequence having at least 90% identity to a sequence selected from SEQ ID NOs: 3155-3179. In some embodiments, the at least one guide RNA has a crRNA sequence having at least 95% identity to a sequence selected from SEQ ID NOs: 3155-3179. In some embodiments, the at least one guide RNA has a crRNA sequence selected from SEQ ID NOs: 3155-3179. In some embodiments, the joint disease or condition is arthritis, e.g., osteoarthritis. In some embodiments, the administering includes intra-articular injection of the pharmaceutical composition into the joint of the subject.

[0514] In some embodiments, the present disclosure provides a pharmaceutical composition for the treatment or prevention of a joint disease or condition, the composition including a therapeutically effective amount of one or more nucleic acids encoding a Clustered Regularly Interspaced Short Palindromic Repeats (CRISPR) gene-editing system. The system includes a CRISPR Associated Protein 9 (Cas9) protein, and at least one guide RNA targeting an CCL5 gene, wherein the target sequence is adjacent to a protospacer adjacent motif (PAM) sequence for the Cas9 protein. In some embodiments, the at least one guide RNA includes a crRNA sequence that is complementary to a target sequence in any one of exons of the CCL5 gene. In some embodiments, the at least one guide RNA includes a crRNA sequence that is complementary to a target sequence in one of exons disclosed herein of the CCL5 gene. In some embodiments, the at least one guide RNA has a crRNA sequence having at least 75% identity to a sequence selected from SEQ ID NOs: 3180-3204. In some embodiments, the at least one guide RNA has a crRNA sequence having at least 80% identity to a sequence selected from SEQ ID NOs: 3180-3204. In some embodiments, the at least one guide RNA has a crRNA sequence having at least 85% identity to a sequence selected from SEQ ID NOs: 3180-3204. In some embodiments, the at least one guide RNA has a crRNA sequence having at least 90% identity to a sequence selected from SEQ ID NOs: 3180-3204. In some embodiments, the at least one guide RNA has a crRNA sequence having at least 95% identity to a sequence selected from SEQ ID NOs: 3180-3204. In some embodiments, the at least one guide RNA has a crRNA sequence selected from SEQ ID NOs: 3180-3204.

[0515] In some embodiments, the present disclosure provides method for the treatment or prevention of a joint disease or condition in a subject in need thereof. The method includes administering, to a joint of the subject, a pharmaceutical composition including a pharmaceutically effective amount of a composition having one or more nucleic acids encoding a Clustered Regularly Interspaced Short Palindromic Repeats (CRISPR) gene-editing system. The system includes a CRISPR Associated Protein 9 (Cas9) protein, and at least one guide RNA targeting an CCL5 gene, wherein the target sequence is adjacent to a protospacer adjacent motif (PAM) sequence for the Cas9 protein. In some embodiments, the at least one guide RNA includes a crRNA sequence that is complementary to a target sequence in any one of exons of the CCL5 gene. In some embodiments, the at least one guide RNA includes a crRNA sequence that is complementary to a target sequence in one of exons disclosed herein of the CCL5 gene. In some embodiments, the at least one guide RNA has a crRNA sequence having at least 75% identity to a sequence selected from SEQ ID NOs: 3180-3204. In some embodiments, the at least one guide RNA has a crRNA sequence having at least 80% identity to a sequence selected from SEQ ID NOs: 3180-3204. In some embodiments, the at least one guide RNA has a crRNA sequence having at least 85% identity to a sequence selected from SEQ ID NOs: 3180-3204. In some embodiments, the at least one guide RNA has a crRNA sequence having at least 90% identity to a sequence selected from SEQ ID NOs: 3180-3204. In some embodiments, the at least one guide RNA has a crRNA sequence having at least 95% identity to a sequence selected from SEQ ID NOs: 3180-3204. In some embodiments, the at least one guide RNA has a crRNA sequence selected from SEQ ID NOs: 3180-3204. In some embodiments, the joint disease or condition is arthritis, e.g., osteoarthritis. In some embodiments, the administering includes intra-articular injection of the pharmaceutical composition into the joint of the subject.

[0516] In some embodiments, the present disclosure provides a pharmaceutical composition for the treatment or prevention of a joint disease or condition, the composition including a therapeutically effective amount of one or more nucleic acids encoding a Clustered Regularly Interspaced Short Palindromic Repeats (CRISPR) gene-editing system. The system includes a CRISPR Associated Protein 9 (Cas9) protein, and at least one guide RNA targeting an CD160 gene, wherein the target sequence is adjacent to a protospacer adjacent motif (PAM) sequence for the Cas9 protein. In some embodiments, the at least one guide RNA includes a crRNA sequence that is complementary to a target sequence in any one of exons of the CD160 gene. In some embodiments, the at least one guide RNA includes a crRNA sequence that is complementary to a target sequence in one of exons disclosed herein of the CD160 gene. In some embodiments, the at least one guide RNA has a crRNA sequence having at least 75% identity to a sequence selected from SEQ ID NOs: 3205-3229. In some embodiments, the at least one guide RNA has a crRNA sequence having at least 80% identity to a sequence selected from SEQ ID NOs: 3205-3229. In some embodiments, the at least one guide RNA has a crRNA sequence having at least 85% identity to a sequence selected from SEQ ID NOs: 3205-3229. In some embodiments, the at least one guide RNA has a crRNA sequence having at least 90% identity to a sequence selected from SEQ ID NOs: 3205-3229. In some embodiments, the at least one guide RNA has a crRNA sequence having at least 95% identity to a sequence selected from SEQ ID NOs: 3205-3229. In some embodiments, the at least one guide RNA has a crRNA sequence selected from SEQ ID NOs: 3205-3229.

[0517] In some embodiments, the present disclosure provides method for the treatment or prevention of a joint disease or condition in a subject in need thereof. The method includes administering, to a joint of the subject, a pharmaceutical composition including a pharmaceutically effective amount of a composition having one or more nucleic acids encoding a Clustered Regularly Interspaced Short Palindromic Repeats (CRISPR) gene-editing system. The system includes a CRISPR Associated Protein 9 (Cas9) protein, and at least one guide RNA targeting an CD160 gene, wherein the target sequence is adjacent to a protospacer adjacent motif (PAM) sequence for the Cas9 protein. In some embodiments, the at least one guide RNA includes a crRNA sequence that is complementary to a target sequence in any one of exons of the CD160 gene. In some embodiments, the at least one guide RNA includes a crRNA sequence that is complementary to a target sequence in one of exons disclosed herein of the CD160 gene. In some embodiments, the at least one guide RNA has a crRNA sequence having at least 75% identity to a sequence selected from SEQ ID NOs: 3205-3229. In some embodiments, the at least one guide RNA has a crRNA sequence having at least 80% identity to a sequence selected from SEQ ID NOs: 3205-3229. In some embodiments, the at least one guide RNA has a crRNA sequence having at least 85% identity to a sequence selected from SEQ ID NOs: 3205-3229. In some embodiments, the at least one guide RNA has a crRNA sequence having at least 90% identity to a sequence selected from SEQ ID NOs: 3205-3229. In some embodiments, the at least one guide RNA has a crRNA sequence having at least 95% identity to a sequence selected from SEQ ID NOs: 3205-3229. In some embodiments, the at least one guide RNA has a crRNA sequence selected from SEQ ID NOs: 3205-3229. In some embodiments, the joint disease or condition is arthritis, e.g., osteoarthritis. In some embodiments, the administering includes intra-articular injection of the pharmaceutical composition into the joint of the subject.

[0518] In some embodiments, the present disclosure provides a pharmaceutical composition for the treatment or prevention of a joint disease or condition, the composition including a therapeutically effective amount of one or more nucleic acids encoding a Clustered Regularly Interspaced Short Palindromic Repeats (CRISPR) gene-editing system. The system includes a CRISPR Associated Protein 9 (Cas9) protein, and at least one guide RNA targeting an CDKN2A gene, wherein the target sequence is adjacent to a protospacer adjacent motif (PAM) sequence for the Cas9 protein. In some embodiments, the at least one guide RNA includes a crRNA sequence that is complementary to a target sequence in any one of exons of the CDKN2A gene. In some embodiments, the at least one guide RNA includes a crRNA sequence that is complementary to a target sequence in one of exons disclosed herein of the CDKN2A gene. In some embodiments, the at least one guide RNA has a crRNA sequence having at least 75% identity to a sequence selected from SEQ ID NOs: 3230-3254. In some embodiments, the at least one guide RNA has a crRNA sequence having at least 80% identity to a sequence selected from SEQ ID NOs: 3230-3254. In some embodiments, the at least one guide RNA has a crRNA sequence having at least 85% identity to a sequence selected from SEQ ID NOs: 3230-3254. In some embodiments, the at least one guide RNA has a crRNA sequence having at least 90% identity to a sequence selected from SEQ ID NOs: 3230-3254. In some embodiments, the at least one guide RNA has a crRNA sequence having at least 95% identity to a sequence selected from SEQ ID NOs: 3230-3254. In some embodiments, the at least one guide RNA has a crRNA sequence selected from SEQ ID NOs: 3230-3254.

[0519] In some embodiments, the present disclosure provides method for the treatment or prevention of a joint disease or condition in a subject in need thereof. The method includes administering, to a joint of the subject, a pharmaceutical composition including a pharmaceutically effective amount of a composition having one or more nucleic acids encoding a Clustered Regularly Interspaced Short Palindromic Repeats (CRISPR) gene-editing system. The system includes a CRISPR Associated Protein 9 (Cas9) protein, and at least one guide RNA targeting an CDKN2A gene, wherein the target sequence is adjacent to a protospacer adjacent motif (PAM) sequence for the Cas9 protein. In some embodiments, the at least one guide RNA includes a crRNA sequence that is complementary to a target sequence in any one of exons of the CDKN2A gene. In some embodiments, the at least one guide RNA includes a crRNA sequence that is complementary to a target sequence in one of exons disclosed herein of the CDKN2A gene. In some embodiments, the at least one guide RNA has a crRNA sequence having at least 75% identity to a sequence selected from SEQ ID NOs: 3230-3254. In some embodiments, the at least one guide RNA has a crRNA sequence having at least 80% identity to a sequence selected from SEQ ID NOs: 3230-3254. In some embodiments, the at least one guide RNA has a crRNA sequence having at least 85% identity to a sequence selected from SEQ ID NOs: 3230-3254. In some embodiments, the at least one guide RNA has a crRNA sequence having at least 90% identity to a sequence selected from SEQ ID NOs: 3230-3254. In some embodiments, the at least one guide RNA has a crRNA sequence having at least 95% identity to a sequence selected from SEQ ID NOs: 3230-3254. In some embodiments, the at least one guide RNA has a crRNA sequence selected from SEQ ID NOs: 3230-3254. In some embodiments, the joint disease or condition is arthritis, e.g., osteoarthritis. In some embodiments, the administering includes intra-articular injection of the pharmaceutical composition into the joint of the subject.

[0520] In some embodiments, the present disclosure provides a pharmaceutical composition for the treatment or prevention of a joint disease or condition, the composition including a therapeutically effective amount of one or more nucleic acids encoding a Clustered Regularly Interspaced Short Palindromic Repeats (CRISPR) gene-editing system. The system includes a CRISPR Associated Protein 9 (Cas9) protein, and at least one guide RNA targeting an CD53 gene, wherein the target sequence is adjacent to a protospacer adjacent motif (PAM) sequence for the Cas9 protein. In some embodiments, the at least one guide RNA includes a crRNA sequence that is complementary to a target sequence in any one of exons of the CD53 gene. In some embodiments, the at least one guide RNA includes a crRNA sequence that is complementary to a target sequence in one of exons disclosed herein of the CD53 gene. In some embodiments, the at least one guide RNA has a crRNA sequence having at least 75% identity to a sequence selected from SEQ ID NOs: 3255-3279. In some embodiments, the at least one guide RNA has a crRNA sequence having at least 80% identity to a sequence selected from SEQ ID NOs: 3255-3279. In some embodiments, the at least one guide RNA has a crRNA sequence having at least 85% identity to a sequence selected from SEQ ID NOs: 3255-3279. In some embodiments, the at least one guide RNA has a crRNA sequence having at least 90% identity to a sequence selected from SEQ ID NOs: 3255-3279. In some embodiments, the at least one guide RNA has a crRNA sequence having at least 95% identity to a sequence selected from SEQ ID NOs: 3255-3279. In some embodiments, the at least one guide RNA has a crRNA sequence selected from SEQ ID NOs: 3255-3279.

[0521] In some embodiments, the present disclosure provides method for the treatment or prevention of a joint disease or condition in a subject in need thereof. The method includes administering, to a joint of the subject, a pharmaceutical composition including a pharmaceutically effective amount of a composition having one or more nucleic acids encoding a Clustered Regularly Interspaced Short Palindromic Repeats (CRISPR) gene-editing system. The system includes a CRISPR Associated Protein 9 (Cas9) protein, and at least one guide RNA targeting an CD53 gene, wherein the target sequence is adjacent to a protospacer adjacent motif (PAM) sequence for the Cas9 protein. In some embodiments, the at least one guide RNA includes a crRNA sequence that is complementary to a target sequence in any one of exons of the CD53 gene. In some embodiments, the at least one guide RNA includes a crRNA sequence that is complementary to a target sequence in one of exons disclosed herein of the CD53 gene. In some embodiments, the at least one guide RNA has a crRNA sequence having at least 75% identity to a sequence selected from SEQ ID NOs: 3255-3279. In some embodiments, the at least one guide RNA has a crRNA sequence having at least 80% identity to a sequence selected from SEQ ID NOs: 3255-3279. In some embodiments, the at least one guide RNA has a crRNA sequence having at least 85% identity to a sequence selected from SEQ ID NOs: 3255-3279. In some embodiments, the at least one guide RNA has a crRNA sequence having at least 90% identity to a sequence selected from SEQ ID NOs: 3255-3279. In some embodiments, the at least one guide RNA has a crRNA sequence having at least 95% identity to a sequence selected from SEQ ID NOs: 3255-3279. In some embodiments, the at least one guide RNA has a crRNA sequence selected from SEQ ID NOs: 3255-3279. In some embodiments, the joint disease or condition is arthritis, e.g., osteoarthritis. In some embodiments, the administering includes intra-articular injection of the pharmaceutical composition into the joint of the subject.

[0522] In some embodiments, the present disclosure provides a pharmaceutical composition for the treatment or prevention of a joint disease or condition, the composition including a therapeutically effective amount of one or more nucleic acids encoding a Clustered Regularly Interspaced Short Palindromic Repeats (CRISPR) gene-editing system. The system includes a CRISPR Associated Protein 9 (Cas9) protein, and at least one guide RNA targeting an CHEK1 gene, wherein the target sequence is adjacent to a protospacer adjacent motif (PAM) sequence for the Cas9 protein. In some embodiments, the at least one guide RNA includes a crRNA sequence that is complementary to a target sequence in any one of exons of the CHEK1 gene. In some embodiments, the at least one guide RNA includes a crRNA sequence that is complementary to a target sequence in one of exons disclosed herein of the CHEK1 gene. In some embodiments, the at least one guide RNA has a crRNA sequence having at least 75% identity to a sequence selected from SEQ ID NOs: 3280-3304. In some embodiments, the at least one guide RNA has a crRNA sequence having at least 80% identity to a sequence selected from SEQ ID NOs: 3280-3304. In some embodiments, the at least one guide RNA has a crRNA sequence having at least 85% identity to a sequence selected from SEQ ID NOs: 3280-3304. In some embodiments, the at least one guide RNA has a crRNA sequence having at least 90% identity to a sequence selected from SEQ ID NOs: 3280-3304. In some embodiments, the at least one guide RNA has a crRNA sequence having at least 95% identity to a sequence selected from SEQ ID NOs: 3280-3304. In some embodiments, the at least one guide RNA has a crRNA sequence selected from SEQ ID NOs: 3280-3304.

[0523] In some embodiments, the present disclosure provides method for the treatment or prevention of a joint disease or condition in a subject in need thereof. The method includes administering, to a joint of the subject, a pharmaceutical composition including a pharmaceutically effective amount of a composition having one or more nucleic acids encoding a Clustered Regularly Interspaced Short Palindromic Repeats (CRISPR) gene-editing system. The system includes a CRISPR Associated Protein 9 (Cas9) protein, and at least one guide RNA targeting an CHEK1 gene, wherein the target sequence is adjacent to a protospacer adjacent motif (PAM) sequence for the Cas9 protein. In some embodiments, the at least one guide RNA includes a crRNA sequence that is complementary to a target sequence in any one of exons of the CHEK1 gene. In some embodiments, the at least one guide RNA includes a crRNA sequence that is complementary to a target sequence in one of exons disclosed herein of the CHEK1 gene. In some embodiments, the at least one guide RNA has a crRNA sequence having at least 75% identity to a sequence selected from SEQ ID NOs: 3280-3304. In some embodiments, the at least one guide RNA has a crRNA sequence having at least 80% identity to a sequence selected from SEQ ID NOs: 3280-3304. In some embodiments, the at least one guide RNA has a crRNA sequence having at least 85% identity to a sequence selected from SEQ ID NOs: 3280-3304. In some embodiments, the at least one guide RNA has a crRNA sequence having at least 90% identity to a sequence selected from SEQ ID NOs: 3280-3304. In some embodiments, the at least one guide RNA has a crRNA sequence having at least 95% identity to a sequence selected from SEQ ID NOs: 3280-3304. In some embodiments, the at least one guide RNA has a crRNA sequence selected from SEQ ID NOs: 3280-3304. In some embodiments, the joint disease or condition is arthritis, e.g., osteoarthritis. In some embodiments, the administering includes intra-articular injection of the pharmaceutical composition into the joint of the subject.

[0524] In some embodiments, the present disclosure provides a pharmaceutical composition for the treatment or prevention of a joint disease or condition, the composition including a therapeutically effective amount of one or more nucleic acids encoding a Clustered Regularly Interspaced Short Palindromic Repeats (CRISPR) gene-editing system. The system includes a CRISPR Associated Protein 9 (Cas9) protein, and at least one guide RNA targeting an CNNM2 gene, wherein the target sequence is adjacent to a protospacer adjacent motif (PAM) sequence for the Cas9 protein. In some embodiments, the at least one guide RNA includes a crRNA sequence that is complementary to a target sequence in any one of exons of the CNNM2 gene. In some embodiments, the at least one guide RNA includes a crRNA sequence that is complementary to a target sequence in one of exons disclosed herein of the CNNM2 gene. In some embodiments, the at least one guide RNA has a crRNA sequence having at least 75% identity to a sequence selected from SEQ ID NOs: 3305-3329. In some embodiments, the at least one guide RNA has a crRNA sequence having at least 80% identity to a sequence selected from SEQ ID NOs: 3305-3329. In some embodiments, the at least one guide RNA has a crRNA sequence having at least 85% identity to a sequence selected from SEQ ID NOs: 3305-3329. In some embodiments, the at least one guide RNA has a crRNA sequence having at least 90% identity to a sequence selected from SEQ ID NOs: 3305-3329. In some embodiments, the at least one guide RNA has a crRNA sequence having at least 95% identity to a sequence selected from SEQ ID NOs: 3305-3329. In some embodiments, the at least one guide RNA has a crRNA sequence selected from SEQ ID NOs: 3305-3329.

[0525] In some embodiments, the present disclosure provides method for the treatment or prevention of a joint disease or condition in a subject in need thereof. The method includes administering, to a joint of the subject, a pharmaceutical composition including a pharmaceutically effective amount of a composition having one or more nucleic acids encoding a Clustered Regularly Interspaced Short Palindromic Repeats (CRISPR) gene-editing system. The system includes a CRISPR Associated Protein 9 (Cas9) protein, and at least one guide RNA targeting an CNNM2 gene, wherein the target sequence is adjacent to a protospacer adjacent motif (PAM) sequence for the Cas9 protein. In some embodiments, the at least one guide RNA includes a crRNA sequence that is complementary to a target sequence in any one of exons of the CNNM2 gene. In some embodiments, the at least one guide RNA includes a crRNA sequence that is complementary to a target sequence in one of exons disclosed herein of the CNNM2 gene. In some embodiments, the at least one guide RNA has a crRNA sequence having at least 75% identity to a sequence selected from SEQ ID NOs: 3305-3329. In some embodiments, the at least one guide RNA has a crRNA sequence having at least 80% identity to a sequence selected from SEQ ID NOs: 3305-3329. In some embodiments, the at least one guide RNA has a crRNA sequence having at least 85% identity to a sequence selected from SEQ ID NOs: 3305-3329. In some embodiments, the at least one guide RNA has a crRNA sequence having at least 90% identity to a sequence selected from SEQ ID NOs: 3305-3329. In some embodiments, the at least one guide RNA has a crRNA sequence having at least 95% identity to a sequence selected from SEQ ID NOs: 3305-3329. In some embodiments, the at least one guide RNA has a crRNA sequence selected from SEQ ID NOs: 3305-3329. In some embodiments, the joint disease or condition is arthritis, e.g., osteoarthritis. In some embodiments, the administering includes intra-articular injection of the pharmaceutical composition into the joint of the subject.

[0526] In some embodiments, the present disclosure provides a pharmaceutical composition for the treatment or prevention of a joint disease or condition, the composition including a therapeutically effective amount of one or more nucleic acids encoding a Clustered Regularly Interspaced Short Palindromic Repeats (CRISPR) gene-editing system. The system includes a CRISPR Associated Protein 9 (Cas9) protein, and at least one guide RNA targeting an CNTNAP2 gene, wherein the target sequence is adjacent to a protospacer adjacent motif (PAM) sequence for the Cas9 protein. In some embodiments, the at least one guide RNA includes a crRNA sequence that is complementary to a target sequence in any one of exons of the CNTNAP2 gene. In some embodiments, the at least one guide RNA includes a crRNA sequence that is complementary to a target sequence in one of exons disclosed herein of the CNTNAP2 gene. In some embodiments, the at least one guide RNA has a crRNA sequence having at least 75% identity to a sequence selected from SEQ ID NOs: 3330-3354. In some embodiments, the at least one guide RNA has a crRNA sequence having at least 80% identity to a sequence selected from SEQ ID NOs: 3330-3354. In some embodiments, the at least one guide RNA has a crRNA sequence having at least 85% identity to a sequence selected from SEQ ID NOs: 3330-3354. In some embodiments, the at least one guide RNA has a crRNA sequence having at least 90% identity to a sequence selected from SEQ ID NOs: 3330-3354. In some embodiments, the at least one guide RNA has a crRNA sequence having at least 95% identity to a sequence selected from SEQ ID NOs: 3330-3354. In some embodiments, the at least one guide RNA has a crRNA sequence selected from SEQ ID NOs: 3330-3354.

[0527] In some embodiments, the present disclosure provides method for the treatment or prevention of a joint disease or condition in a subject in need thereof. The method includes administering, to a joint of the subject, a pharmaceutical composition including a pharmaceutically effective amount of a composition having one or more nucleic acids encoding a Clustered Regularly Interspaced Short Palindromic Repeats (CRISPR) gene-editing system. The system includes a CRISPR Associated Protein 9 (Cas9) protein, and at least one guide RNA targeting an CNTNAP2 gene, wherein the target sequence is adjacent to a protospacer adjacent motif (PAM) sequence for the Cas9 protein. In some embodiments, the at least one guide RNA includes a crRNA sequence that is complementary to a target sequence in any one of exons of the CNTNAP2 gene. In some embodiments, the at least one guide RNA includes a crRNA sequence that is complementary to a target sequence in one of exons disclosed herein of the CNTNAP2 gene. In some embodiments, the at least one guide RNA has a crRNA sequence having at least 75% identity to a sequence selected from SEQ ID NOs: 3330-3354. In some embodiments, the at least one guide RNA has a crRNA sequence having at least 80% identity to a sequence selected from SEQ ID NOs: 3330-3354. In some embodiments, the at least one guide RNA has a crRNA sequence having at least 85% identity to a sequence selected from SEQ ID NOs: 3330-3354. In some embodiments, the at least one guide RNA has a crRNA sequence having at least 90% identity to a sequence selected from SEQ ID NOs: 3330-3354. In some embodiments, the at least one guide RNA has a crRNA sequence having at least 95% identity to a sequence selected from SEQ ID NOs: 3330-3354. In some embodiments, the at least one guide RNA has a crRNA sequence selected from SEQ ID NOs: 3330-3354. In some embodiments, the joint disease or condition is arthritis, e.g., osteoarthritis. In some embodiments, the administering includes intra-articular injection of the pharmaceutical composition into the joint of the subject.

[0528] In some embodiments, the present disclosure provides a pharmaceutical composition for the treatment or prevention of a joint disease or condition, the composition including a therapeutically effective amount of one or more nucleic acids encoding a Clustered Regularly Interspaced Short Palindromic Repeats (CRISPR) gene-editing system. The system includes a CRISPR Associated Protein 9 (Cas9) protein, and at least one guide RNA targeting an CSMD1 gene, wherein the target sequence is adjacent to a protospacer adjacent motif (PAM) sequence for the Cas9 protein. In some embodiments, the at least one guide RNA includes a crRNA sequence that is complementary to a target sequence in any one of exons of the CSMD1 gene. In some embodiments, the at least one guide RNA includes a crRNA sequence that is complementary to a target sequence in one of exons disclosed herein of the CSMD1 gene. In some embodiments, the at least one guide RNA has a crRNA sequence having at least 75% identity to a sequence selected from SEQ ID NOs: 3355-3379. In some embodiments, the at least one guide RNA has a crRNA sequence having at least 80% identity to a sequence selected from SEQ ID NOs: 3355-3379. In some embodiments, the at least one guide RNA has a crRNA sequence having at least 85% identity to a sequence selected from SEQ ID NOs: 3355-3379. In some embodiments, the at least one guide RNA has a crRNA sequence having at least 90% identity to a sequence selected from SEQ ID NOs: 3355-3379. In some embodiments, the at least one guide RNA has a crRNA sequence having at least 95% identity to a sequence selected from SEQ ID NOs: 3355-3379. In some embodiments, the at least one guide RNA has a crRNA sequence selected from SEQ ID NOs: 3355-3379.

[0529] In some embodiments, the present disclosure provides method for the treatment or prevention of a joint disease or condition in a subject in need thereof. The method includes administering, to a joint of the subject, a pharmaceutical composition including a pharmaceutically effective amount of a composition having one or more nucleic acids encoding a Clustered Regularly Interspaced Short Palindromic Repeats (CRISPR) gene-editing system. The system includes a CRISPR Associated Protein 9 (Cas9) protein, and at least one guide RNA targeting an CSMD1 gene, wherein the target sequence is adjacent to a protospacer adjacent motif (PAM) sequence for the Cas9 protein. In some embodiments, the at least one guide RNA includes a crRNA sequence that is complementary to a target sequence in any one of exons of the CSMD1 gene. In some embodiments, the at least one guide RNA includes a crRNA sequence that is complementary to a target sequence in one of exons disclosed herein of the CSMD1 gene. In some embodiments, the at least one guide RNA has a crRNA sequence having at least 75% identity to a sequence selected from SEQ ID NOs: 3355-3379. In some embodiments, the at least one guide RNA has a crRNA sequence having at least 80% identity to a sequence selected from SEQ ID NOs: 3355-3379. In some embodiments, the at least one guide RNA has a crRNA sequence having at least 85% identity to a sequence selected from SEQ ID NOs: 3355-3379. In some embodiments, the at least one guide RNA has a crRNA sequence having at least 90% identity to a sequence selected from SEQ ID NOs: 3355-3379. In some embodiments, the at least one guide RNA has a crRNA sequence having at least 95% identity to a sequence selected from SEQ ID NOs: 3355-3379. In some embodiments, the at least one guide RNA has a crRNA sequence selected from SEQ ID NOs: 3355-3379. In some embodiments, the joint disease or condition is arthritis, e.g., osteoarthritis. In some embodiments, the administering includes intra-articular injection of the pharmaceutical composition into the joint of the subject.

[0530] In some embodiments, the present disclosure provides a pharmaceutical composition for the treatment or prevention of a joint disease or condition, the composition including a therapeutically effective amount of one or more nucleic acids encoding a Clustered Regularly Interspaced Short Palindromic Repeats (CRISPR) gene-editing system. The system includes a CRISPR Associated Protein 9 (Cas9) protein, and at least one guide RNA targeting an CTSB gene, wherein the target sequence is adjacent to a protospacer adjacent motif (PAM) sequence for the Cas9 protein. In some embodiments, the at least one guide RNA includes a crRNA sequence that is complementary to a target sequence in any one of exons of the CTSB gene. In some embodiments, the at least one guide RNA includes a crRNA sequence that is complementary to a target sequence in one of exons disclosed herein of the CTSB gene. In some embodiments, the at least one guide RNA has a crRNA sequence having at least 75% identity to a sequence selected from SEQ ID NOs: 3380-3404. In some embodiments, the at least one guide RNA has a crRNA sequence having at least 80% identity to a sequence selected from SEQ ID NOs: 3380-3404. In some embodiments, the at least one guide RNA has a crRNA sequence having at least 85% identity to a sequence selected from SEQ ID NOs: 3380-3404. In some embodiments, the at least one guide RNA has a crRNA sequence having at least 90% identity to a sequence selected from SEQ ID NOs: 3380-3404. In some embodiments, the at least one guide RNA has a crRNA sequence having at least 95% identity to a sequence selected from SEQ ID NOs: 3380-3404. In some embodiments, the at least one guide RNA has a crRNA sequence selected from SEQ ID NOs: 3380-3404.

[0531] In some embodiments, the present disclosure provides method for the treatment or prevention of a joint disease or condition in a subject in need thereof. The method includes administering, to a joint of the subject, a pharmaceutical composition including a pharmaceutically effective amount of a composition having one or more nucleic acids encoding a Clustered Regularly Interspaced Short Palindromic Repeats (CRISPR) gene-editing system. The system includes a CRISPR Associated Protein 9 (Cas9) protein, and at least one guide RNA targeting an CTSB gene, wherein the target sequence is adjacent to a protospacer adjacent motif (PAM) sequence for the Cas9 protein. In some embodiments, the at least one guide RNA includes a crRNA sequence that is complementary to a target sequence in any one of exons of the CTSB gene. In some embodiments, the at least one guide RNA includes a crRNA sequence that is complementary to a target sequence in one of exons disclosed herein of the CTSB gene. In some embodiments, the at least one guide RNA has a crRNA sequence having at least 75% identity to a sequence selected from SEQ ID NOs: 3380-3404. In some embodiments, the at least one guide RNA has a crRNA sequence having at least 80% identity to a sequence selected from SEQ ID NOs: 3380-3404. In some embodiments, the at least one guide RNA has a crRNA sequence having at least 85% identity to a sequence selected from SEQ ID NOs: 3380-3404. In some embodiments, the at least one guide RNA has a crRNA sequence having at least 90% identity to a sequence selected from SEQ ID NOs: 3380-3404. In some embodiments, the at least one guide RNA has a crRNA sequence having at least 95% identity to a sequence selected from SEQ ID NOs: 3380-3404. In some embodiments, the at least one guide RNA has a crRNA sequence selected from SEQ ID NOs: 3380-3404. In some embodiments, the joint disease or condition is arthritis, e.g., osteoarthritis. In some embodiments, the administering includes intra-articular injection of the pharmaceutical composition into the joint of the subject.

[0532] In some embodiments, the present disclosure provides a pharmaceutical composition for the treatment or prevention of a joint disease or condition, the composition including a therapeutically effective amount of one or more nucleic acids encoding a Clustered Regularly Interspaced Short Palindromic Repeats (CRISPR) gene-editing system. The system includes a CRISPR Associated Protein 9 (Cas9) protein, and at least one guide RNA targeting an CTLA4 gene, wherein the target sequence is adjacent to a protospacer adjacent motif (PAM) sequence for the Cas9 protein. In some embodiments, the at least one guide RNA includes a crRNA sequence that is complementary to a target sequence in any one of exons of the CTLA4 gene. In some embodiments, the at least one guide RNA includes a crRNA sequence that is complementary to a target sequence in one of exons disclosed herein of the CTLA4 gene. In some embodiments, the at least one guide RNA has a crRNA sequence having at least 75% identity to a sequence selected from SEQ ID NOs: 3405-3429. In some embodiments, the at least one guide RNA has a crRNA sequence having at least 80% identity to a sequence selected from SEQ ID NOs: 3405-3429. In some embodiments, the at least one guide RNA has a crRNA sequence having at least 85% identity to a sequence selected from SEQ ID NOs: 3405-3429. In some embodiments, the at least one guide RNA has a crRNA sequence having at least 90% identity to a sequence selected from SEQ ID NOs: 3405-3429. In some embodiments, the at least one guide RNA has a crRNA sequence having at least 95% identity to a sequence selected from SEQ ID NOs: 3405-3429. In some embodiments, the at least one guide RNA has a crRNA sequence selected from SEQ ID NOs: 3405-3429.

[0533] In some embodiments, the present disclosure provides method for the treatment or prevention of a joint disease or condition in a subject in need thereof. The method includes administering, to a joint of the subject, a pharmaceutical composition including a pharmaceutically effective amount of a composition having one or more nucleic acids encoding a Clustered Regularly Interspaced Short Palindromic Repeats (CRISPR) gene-editing system. The system includes a CRISPR Associated Protein 9 (Cas9) protein, and at least one guide RNA targeting an CTLA4 gene, wherein the target sequence is adjacent to a protospacer adjacent motif (PAM) sequence for the Cas9 protein. In some embodiments, the at least one guide RNA includes a crRNA sequence that is complementary to a target sequence in any one of exons of the CTLA4 gene. In some embodiments, the at least one guide RNA includes a crRNA sequence that is complementary to a target sequence in one of exons disclosed herein of the CTLA4 gene. In some embodiments, the at least one guide RNA has a crRNA sequence having at least 75% identity to a sequence selected from SEQ ID NOs: 3405-3429. In some embodiments, the at least one guide RNA has a crRNA sequence having at least 80% identity to a sequence selected from SEQ ID NOs: 3405-3429. In some embodiments, the at least one guide RNA has a crRNA sequence having at least 85% identity to a sequence selected from SEQ ID NOs: 3405-3429. In some embodiments, the at least one guide RNA has a crRNA sequence having at least 90% identity to a sequence selected from SEQ ID NOs: 3405-3429. In some embodiments, the at least one guide RNA has a crRNA sequence having at least 95% identity to a sequence selected from SEQ ID NOs: 3405-3429. In some embodiments, the at least one guide RNA has a crRNA sequence selected from SEQ ID NOs: 3405-3429. In some embodiments, the joint disease or condition is arthritis, e.g., osteoarthritis. In some embodiments, the administering includes intra-articular injection of the pharmaceutical composition into the joint of the subject.

[0534] In some embodiments, the present disclosure provides a pharmaceutical composition for the treatment or prevention of a joint disease or condition, the composition including a therapeutically effective amount of one or more nucleic acids encoding a Clustered Regularly Interspaced Short Palindromic Repeats (CRISPR) gene-editing system. The system includes a CRISPR Associated Protein 9 (Cas9) protein, and at least one guide RNA targeting an CLEC1A gene, wherein the target sequence is adjacent to a protospacer adjacent motif (PAM) sequence for the Cas9 protein. In some embodiments, the at least one guide RNA includes a crRNA sequence that is complementary to a target sequence in any one of exons of the CLEC1A gene. In some embodiments, the at least one guide RNA includes a crRNA sequence that is complementary to a target sequence in one of exons disclosed herein of the CLEC1A gene. In some embodiments, the at least one guide RNA has a crRNA sequence having at least 75% identity to a sequence selected from SEQ ID NOs: 3430-3454. In some embodiments, the at least one guide RNA has a crRNA sequence having at least 80% identity to a sequence selected from SEQ ID NOs: 3430-3454. In some embodiments, the at least one guide RNA has a crRNA sequence having at least 85% identity to a sequence selected from SEQ ID NOs: 3430-3454. In some embodiments, the at least one guide RNA has a crRNA sequence having at least 90% identity to a sequence selected from SEQ ID NOs: 3430-3454. In some embodiments, the at least one guide RNA has a crRNA sequence having at least 95% identity to a sequence selected from SEQ ID NOs: 3430-3454. In some embodiments, the at least one guide RNA has a crRNA sequence selected from SEQ ID NOs: 3430-3454.

[0535] In some embodiments, the present disclosure provides method for the treatment or prevention of a joint disease or condition in a subject in need thereof. The method includes administering, to a joint of the subject, a pharmaceutical composition including a pharmaceutically effective amount of a composition having one or more nucleic acids encoding a Clustered Regularly Interspaced Short Palindromic Repeats (CRISPR) gene-editing system. The system includes a CRISPR Associated Protein 9 (Cas9) protein, and at least one guide RNA targeting an CLEC1A gene, wherein the target sequence is adjacent to a protospacer adjacent motif (PAM) sequence for the Cas9 protein. In some embodiments, the at least one guide RNA includes a crRNA sequence that is complementary to a target sequence in any one of exons of the CLEC1A gene. In some embodiments, the at least one guide RNA includes a crRNA sequence that is complementary to a target sequence in one of exons disclosed herein of the CLEC1A gene. In some embodiments, the at least one guide RNA has a crRNA sequence having at least 75% identity to a sequence selected from SEQ ID NOs: 3430-3454. In some embodiments, the at least one guide RNA has a crRNA sequence having at least 80% identity to a sequence selected from SEQ ID NOs: 3430-3454. In some embodiments, the at least one guide RNA has a crRNA sequence having at least 85% identity to a sequence selected from SEQ ID NOs: 3430-3454. In some embodiments, the at least one guide RNA has a crRNA sequence having at least 90% identity to a sequence selected from SEQ ID NOs: 3430-3454. In some embodiments, the at least one guide RNA has a crRNA sequence having at least 95% identity to a sequence selected from SEQ ID NOs: 3430-3454. In some embodiments, the at least one guide RNA has a crRNA sequence selected from SEQ ID NOs: 3430-3454. In some embodiments, the joint disease or condition is arthritis, e.g., osteoarthritis. In some embodiments, the administering includes intra-articular injection of the pharmaceutical composition into the joint of the subject.

[0536] In some embodiments, the present disclosure provides a pharmaceutical composition for the treatment or prevention of a joint disease or condition, the composition including a therapeutically effective amount of one or more nucleic acids encoding a Clustered Regularly Interspaced Short Palindromic Repeats (CRISPR) gene-editing system. The system includes a CRISPR Associated Protein 9 (Cas9) protein, and at least one guide RNA targeting an CXCL10 gene, wherein the target sequence is adjacent to a protospacer adjacent motif (PAM) sequence for the Cas9 protein. In some embodiments, the at least one guide RNA includes a crRNA sequence that is complementary to a target sequence in any one of exons of the CXCL10 gene. In some embodiments, the at least one guide RNA includes a crRNA sequence that is complementary to a target sequence in one of exons disclosed herein of the CXCL10 gene. In some embodiments, the at least one guide RNA has a crRNA sequence having at least 75% identity to a sequence selected from SEQ ID NOs: 3455-3474. In some embodiments, the at least one guide RNA has a crRNA sequence having at least 80% identity to a sequence selected from SEQ ID NOs: 3455-3474. In some embodiments, the at least one guide RNA has a crRNA sequence having at least 85% identity to a sequence selected from SEQ ID NOs: 3455-3474. In some embodiments, the at least one guide RNA has a crRNA sequence having at least 90% identity to a sequence selected from SEQ ID NOs: 3455-3474. In some embodiments, the at least one guide RNA has a crRNA sequence having at least 95% identity to a sequence selected from SEQ ID NOs: 3455-3474. In some embodiments, the at least one guide RNA has a crRNA sequence selected from SEQ ID NOs: 3455-3474.

[0537] In some embodiments, the present disclosure provides method for the treatment or prevention of a joint disease or condition in a subject in need thereof. The method includes administering, to a joint of the subject, a pharmaceutical composition including a pharmaceutically effective amount of a composition having one or more nucleic acids encoding a Clustered Regularly Interspaced Short Palindromic Repeats (CRISPR) gene-editing system. The system includes a CRISPR Associated Protein 9 (Cas9) protein, and at least one guide RNA targeting an CXCL10 gene, wherein the target sequence is adjacent to a protospacer adjacent motif (PAM) sequence for the Cas9 protein. In some embodiments, the at least one guide RNA includes a crRNA sequence that is complementary to a target sequence in any one of exons of the CXCL 10 gene. In some embodiments, the at least one guide RNA includes a crRNA sequence that is complementary to a target sequence in one of exons disclosed herein of the CXCL10 gene. In some embodiments, the at least one guide RNA has a crRNA sequence having at least 75% identity to a sequence selected from SEQ ID NOs: 3455-3474. In some embodiments, the at least one guide RNA has a crRNA sequence having at least 80% identity to a sequence selected from SEQ ID NOs: 3455-3474. In some embodiments, the at least one guide RNA has a crRNA sequence having at least 85% identity to a sequence selected from SEQ ID NOs: 3455-3474. In some embodiments, the at least one guide RNA has a crRNA sequence having at least 90% identity to a sequence selected from SEQ ID NOs: 3455-3474. In some embodiments, the at least one guide RNA has a crRNA sequence having at least 95% identity to a sequence selected from SEQ ID NOs: 3455-3474. In some embodiments, the at least one guide RNA has a crRNA sequence selected from SEQ ID NOs: 3455-3474. In some embodiments, the joint disease or condition is arthritis, e.g., osteoarthritis. In some embodiments, the administering includes intra-articular injection of the pharmaceutical composition into the joint of the subject.

[0538] In some embodiments, the present disclosure provides a pharmaceutical composition for the treatment or prevention of a joint disease or condition, the composition including a therapeutically effective amount of one or more nucleic acids encoding a Clustered Regularly Interspaced Short Palindromic Repeats (CRISPR) gene-editing system. The system includes a CRISPR Associated Protein 9 (Cas9) protein, and at least one guide RNA targeting an CYP17A1 gene, wherein the target sequence is adjacent to a protospacer adjacent motif (PAM) sequence for the Cas9 protein. In some embodiments, the at least one guide RNA includes a crRNA sequence that is complementary to a target sequence in any one of exons of the CYP17A1 gene. In some embodiments, the at least one guide RNA includes a crRNA sequence that is complementary to a target sequence in one of exons disclosed herein of the CYP17A1 gene. In some embodiments, the at least one guide RNA has a crRNA sequence having at least 75% identity to a sequence selected from SEQ ID NOs: 3475-3499. In some embodiments, the at least one guide RNA has a crRNA sequence having at least 80% identity to a sequence selected from SEQ ID NOs: 3475-3499. In some embodiments, the at least one guide RNA has a crRNA sequence having at least 85% identity to a sequence selected from SEQ ID NOs: 3475-3499. In some embodiments, the at least one guide RNA has a crRNA sequence having at least 90% identity to a sequence selected from SEQ ID NOs: 3475-3499. In some embodiments, the at least one guide RNA has a crRNA sequence having at least 95% identity to a sequence selected from SEQ ID NOs: 3475-3499. In some embodiments, the at least one guide RNA has a crRNA sequence selected from SEQ ID NOs: 3475-3499.

[0539] In some embodiments, the present disclosure provides method for the treatment or prevention of a joint disease or condition in a subject in need thereof. The method includes administering, to a joint of the subject, a pharmaceutical composition including a pharmaceutically effective amount of a composition having one or more nucleic acids encoding a Clustered Regularly Interspaced Short Palindromic Repeats (CRISPR) gene-editing system. The system includes a CRISPR Associated Protein 9 (Cas9) protein, and at least one guide RNA targeting an CYP17A1 gene, wherein the target sequence is adjacent to a protospacer adjacent motif (PAM) sequence for the Cas9 protein. In some embodiments, the at least one guide RNA includes a crRNA sequence that is complementary to a target sequence in any one of exons of the CYP17A1 gene. In some embodiments, the at least one guide RNA includes a crRNA sequence that is complementary to a target sequence in one of exons disclosed herein of the CYP17A1 gene. In some embodiments, the at least one guide RNA has a crRNA sequence having at least 75% identity to a sequence selected from SEQ ID NOs: 3475-3499. In some embodiments, the at least one guide RNA has a crRNA sequence having at least 80% identity to a sequence selected from SEQ ID NOs: 3475-3499. In some embodiments, the at least one guide RNA has a crRNA sequence having at least 85% identity to a sequence selected from SEQ ID NOs: 3475-3499. In some embodiments, the at least one guide RNA has a crRNA sequence having at least 90% identity to a sequence selected from SEQ ID NOs: 3475-3499. In some embodiments, the at least one guide RNA has a crRNA sequence having at least 95% identity to a sequence selected from SEQ ID NOs: 3475-3499. In some embodiments, the at least one guide RNA has a crRNA sequence selected from SEQ ID NOs: 3475-3499. In some embodiments, the joint disease or condition is arthritis, e.g., osteoarthritis. In some embodiments, the administering includes intra-articular injection of the pharmaceutical composition into the joint of the subject.

[0540] In some embodiments, the present disclosure provides a pharmaceutical composition for the treatment or prevention of a joint disease or condition, the composition including a therapeutically effective amount of one or more nucleic acids encoding a Clustered Regularly Interspaced Short Palindromic Repeats (CRISPR) gene-editing system. The system includes a CRISPR Associated Protein 9 (Cas9) protein, and at least one guide RNA targeting an DDX60 gene, wherein the target sequence is adjacent to a protospacer adjacent motif (PAM) sequence for the Cas9 protein. In some embodiments, the at least one guide RNA includes a crRNA sequence that is complementary to a target sequence in any one of exons of the DDX60 gene. In some embodiments, the at least one guide RNA includes a crRNA sequence that is complementary to a target sequence in one of exons disclosed herein of the DDX60 gene. In some embodiments, the at least one guide RNA has a crRNA sequence having at least 75% identity to a sequence selected from SEQ ID NOs: 3500-3524. In some embodiments, the at least one guide RNA has a crRNA sequence having at least 80% identity to a sequence selected from SEQ ID NOs: 3500-3524. In some embodiments, the at least one guide RNA has a crRNA sequence having at least 85% identity to a sequence selected from SEQ ID NOs: 3500-3524. In some embodiments, the at least one guide RNA has a crRNA sequence having at least 90% identity to a sequence selected from SEQ ID NOs: 3500-3524. In some embodiments, the at least one guide RNA has a crRNA sequence having at least 95% identity to a sequence selected from SEQ ID NOs: 3500-3524. In some embodiments, the at least one guide RNA has a crRNA sequence selected from SEQ ID NOs: 3500-3524.

[0541] In some embodiments, the present disclosure provides method for the treatment or prevention of a joint disease or condition in a subject in need thereof. The method includes administering, to a joint of the subject, a pharmaceutical composition including a pharmaceutically effective amount of a composition having one or more nucleic acids encoding a Clustered Regularly Interspaced Short Palindromic Repeats (CRISPR) gene-editing system. The system includes a CRISPR Associated Protein 9 (Cas9) protein, and at least one guide RNA targeting an DDX60 gene, wherein the target sequence is adjacent to a protospacer adjacent motif (PAM) sequence for the Cas9 protein. In some embodiments, the at least one guide RNA includes a crRNA sequence that is complementary to a target sequence in any one of exons of the DDX60 gene. In some embodiments, the at least one guide RNA includes a crRNA sequence that is complementary to a target sequence in one of exons disclosed herein of the DDX60 gene. In some embodiments, the at least one guide RNA has a crRNA sequence having at least 75% identity to a sequence selected from SEQ ID NOs: 3500-3524. In some embodiments, the at least one guide RNA has a crRNA sequence having at least 80% identity to a sequence selected from SEQ ID NOs: 3500-3524. In some embodiments, the at least one guide RNA has a crRNA sequence having at least 85% identity to a sequence selected from SEQ ID NOs: 3500-3524. In some embodiments, the at least one guide RNA has a crRNA sequence having at least 90% identity to a sequence selected from SEQ ID NOs: 3500-3524. In some embodiments, the at least one guide RNA has a crRNA sequence having at least 95% identity to a sequence selected from SEQ ID NOs: 3500-3524. In some embodiments, the at least one guide RNA has a crRNA sequence selected from SEQ ID NOs: 3500-3524. In some embodiments, the joint disease or condition is arthritis, e.g., osteoarthritis. In some embodiments, the administering includes intra-articular injection of the pharmaceutical composition into the joint of the subject.

[0542] In some embodiments, the present disclosure provides a pharmaceutical composition for the treatment or prevention of a joint disease or condition, the composition including a therapeutically effective amount of one or more nucleic acids encoding a Clustered Regularly Interspaced Short Palindromic Repeats (CRISPR) gene-editing system. The system includes a CRISPR Associated Protein 9 (Cas9) protein, and at least one guide RNA targeting an DYNC1I1 gene, wherein the target sequence is adjacent to a protospacer adjacent motif (PAM) sequence for the Cas9 protein. In some embodiments, the at least one guide RNA includes a crRNA sequence that is complementary to a target sequence in any one of exons of the DYNC1I1 gene. In some embodiments, the at least one guide RNA includes a crRNA sequence that is complementary to a target sequence in one of exons disclosed herein of the DYNC1I1 gene. In some embodiments, the at least one guide RNA has a crRNA sequence having at least 75% identity to a sequence selected from SEQ ID NOs: 3525-3549. In some embodiments, the at least one guide RNA has a crRNA sequence having at least 80% identity to a sequence selected from SEQ ID NOs: 3525-3549. In some embodiments, the at least one guide RNA has a crRNA sequence having at least 85% identity to a sequence selected from SEQ ID NOs: 3525-3549. In some embodiments, the at least one guide RNA has a crRNA sequence having at least 90% identity to a sequence selected from SEQ ID NOs: 3525-3549. In some embodiments, the at least one guide RNA has a crRNA sequence having at least 95% identity to a sequence selected from SEQ ID NOs: 3525-3549. In some embodiments, the at least one guide RNA has a crRNA sequence selected from SEQ ID NOs: 3525-3549.

[0543] In some embodiments, the present disclosure provides method for the treatment or prevention of a joint disease or condition in a subject in need thereof. The method includes administering, to a joint of the subject, a pharmaceutical composition including a pharmaceutically effective amount of a composition having one or more nucleic acids encoding a Clustered Regularly Interspaced Short Palindromic Repeats (CRISPR) gene-editing system. The system includes a CRISPR Associated Protein 9 (Cas9) protein, and at least one guide RNA targeting an DYNC1I1 gene, wherein the target sequence is adjacent to a protospacer adjacent motif (PAM) sequence for the Cas9 protein. In some embodiments, the at least one guide RNA includes a crRNA sequence that is complementary to a target sequence in any one of exons of the DYNC1I1 gene. In some embodiments, the at least one guide RNA includes a crRNA sequence that is complementary to a target sequence in one of exons disclosed herein of the DYNC1I1 gene. In some embodiments, the at least one guide RNA has a crRNA sequence having at least 75% identity to a sequence selected from SEQ ID NOs: 3525-3549. In some embodiments, the at least one guide RNA has a crRNA sequence having at least 80% identity to a sequence selected from SEQ ID NOs: 3525-3549. In some embodiments, the at least one guide RNA has a crRNA sequence having at least 85% identity to a sequence selected from SEQ ID NOs: 3525-3549. In some embodiments, the at least one guide RNA has a crRNA sequence having at least 90% identity to a sequence selected from SEQ ID NOs: 3525-3549. In some embodiments, the at least one guide RNA has a crRNA sequence having at least 95% identity to a sequence selected from SEQ ID NOs: 3525-3549. In some embodiments, the at least one guide RNA has a crRNA sequence selected from SEQ ID NOs: 3525-3549. In some embodiments, the joint disease or condition is arthritis, e.g., osteoarthritis. In some embodiments, the administering includes intra-articular injection of the pharmaceutical composition into the joint of the subject.

[0544] In some embodiments, the present disclosure provides a pharmaceutical composition for the treatment or prevention of a joint disease or condition, the composition including a therapeutically effective amount of one or more nucleic acids encoding a Clustered Regularly Interspaced Short Palindromic Repeats (CRISPR) gene-editing system. The system includes a CRISPR Associated Protein 9 (Cas9) protein, and at least one guide RNA targeting an FOXO3 gene, wherein the target sequence is adjacent to a protospacer adjacent motif (PAM) sequence for the Cas9 protein. In some embodiments, the at least one guide RNA includes a crRNA sequence that is complementary to a target sequence in any one of exons of the FOXO3 gene. In some embodiments, the at least one guide RNA includes a crRNA sequence that is complementary to a target sequence in one of exons disclosed herein of the FOXO3 gene. In some embodiments, the at least one guide RNA has a crRNA sequence having at least 75% identity to a sequence selected from SEQ ID NOs: 3550-3574. In some embodiments, the at least one guide RNA has a crRNA sequence having at least 80% identity to a sequence selected from SEQ ID NOs: 3550-3574. In some embodiments, the at least one guide RNA has a crRNA sequence having at least 85% identity to a sequence selected from SEQ ID NOs: 3550-3574. In some embodiments, the at least one guide RNA has a crRNA sequence having at least 90% identity to a sequence selected from SEQ ID NOs: 3550-3574. In some embodiments, the at least one guide RNA has a crRNA sequence having at least 95% identity to a sequence selected from SEQ ID NOs: 3550-3574. In some embodiments, the at least one guide RNA has a crRNA sequence selected from SEQ ID NOs: 3550-3574.

[0545] In some embodiments, the present disclosure provides method for the treatment or prevention of a joint disease or condition in a subject in need thereof. The method includes administering, to a joint of the subject, a pharmaceutical composition including a pharmaceutically effective amount of a composition having one or more nucleic acids encoding a Clustered Regularly Interspaced Short Palindromic Repeats (CRISPR) gene-editing system. The system includes a CRISPR Associated Protein 9 (Cas9) protein, and at least one guide RNA targeting an FOXO3 gene, wherein the target sequence is adjacent to a protospacer adjacent motif (PAM) sequence for the Cas9 protein. In some embodiments, the at least one guide RNA includes a crRNA sequence that is complementary to a target sequence in any one of exons of the FOXO3 gene. In some embodiments, the at least one guide RNA includes a crRNA sequence that is complementary to a target sequence in one of exons disclosed herein of the FOXO3 gene. In some embodiments, the at least one guide RNA has a crRNA sequence having at least 75% identity to a sequence selected from SEQ ID NOs: 3550-3574. In some embodiments, the at least one guide RNA has a crRNA sequence having at least 80% identity to a sequence selected from SEQ ID NOs: 3550-3574. In some embodiments, the at least one guide RNA has a crRNA sequence having at least 85% identity to a sequence selected from SEQ ID NOs: 3550-3574. In some embodiments, the at least one guide RNA has a crRNA sequence having at least 90% identity to a sequence selected from SEQ ID NOs: 3550-3574. In some embodiments, the at least one guide RNA has a crRNA sequence having at least 95% identity to a sequence selected from SEQ ID NOs: 3550-3574. In some embodiments, the at least one guide RNA has a crRNA sequence selected from SEQ ID NOs: 3550-3574. In some embodiments, the joint disease or condition is arthritis, e.g., osteoarthritis. In some embodiments, the administering includes intra-articular injection of the pharmaceutical composition into the joint of the subject.

[0546] In some embodiments, the present disclosure provides a pharmaceutical composition for the treatment or prevention of a joint disease or condition, the composition including a therapeutically effective amount of one or more nucleic acids encoding a Clustered Regularly Interspaced Short Palindromic Repeats (CRISPR) gene-editing system. The system includes a CRISPR Associated Protein 9 (Cas9) protein, and at least one guide RNA targeting an GPC6 gene, wherein the target sequence is adjacent to a protospacer adjacent motif (PAM) sequence for the Cas9 protein. In some embodiments, the at least one guide RNA includes a crRNA sequence that is complementary to a target sequence in any one of exons of the GPC6 gene. In some embodiments, the at least one guide RNA includes a crRNA sequence that is complementary to a target sequence in one of exons disclosed herein of the GPC6 gene. In some embodiments, the at least one guide RNA has a crRNA sequence having at least 75% identity to a sequence selected from SEQ ID NOs: 3575-3599. In some embodiments, the at least one guide RNA has a crRNA sequence having at least 80% identity to a sequence selected from SEQ ID NOs: 3575-3599. In some embodiments, the at least one guide RNA has a crRNA sequence having at least 85% identity to a sequence selected from SEQ ID NOs: 3575-3599. In some embodiments, the at least one guide RNA has a crRNA sequence having at least 90% identity to a sequence selected from SEQ ID NOs: 3575-3599. In some embodiments, the at least one guide RNA has a crRNA sequence having at least 95% identity to a sequence selected from SEQ ID NOs: 3575-3599. In some embodiments, the at least one guide RNA has a crRNA sequence selected from SEQ ID NOs: 3575-3599.

[0547] In some embodiments, the present disclosure provides method for the treatment or prevention of a joint disease or condition in a subject in need thereof. The method includes administering, to a joint of the subject, a pharmaceutical composition including a pharmaceutically effective amount of a composition having one or more nucleic acids encoding a Clustered Regularly Interspaced Short Palindromic Repeats (CRISPR) gene-editing system. The system includes a CRISPR Associated Protein 9 (Cas9) protein, and at least one guide RNA targeting an GPC6 gene, wherein the target sequence is adjacent to a protospacer adjacent motif (PAM) sequence for the Cas9 protein. In some embodiments, the at least one guide RNA includes a crRNA sequence that is complementary to a target sequence in any one of exons of the GPC6 gene. In some embodiments, the at least one guide RNA includes a crRNA sequence that is complementary to a target sequence in one of exons disclosed herein of the GPC6 gene. In some embodiments, the at least one guide RNA has a crRNA sequence having at least 75% identity to a sequence selected from SEQ ID NOs: 3575-3599. In some embodiments, the at least one guide RNA has a crRNA sequence having at least 80% identity to a sequence selected from SEQ ID NOs: 3575-3599. In some embodiments, the at least one guide RNA has a crRNA sequence having at least 85% identity to a sequence selected from SEQ ID NOs: 3575-3599. In some embodiments, the at least one guide RNA has a crRNA sequence having at least 90% identity to a sequence selected from SEQ ID NOs: 3575-3599. In some embodiments, the at least one guide RNA has a crRNA sequence having at least 95% identity to a sequence selected from SEQ ID NOs: 3575-3599. In some embodiments, the at least one guide RNA has a crRNA sequence selected from SEQ ID NOs: 3575-3599. In some embodiments, the joint disease or condition is arthritis, e.g., osteoarthritis. In some embodiments, the administering includes intra-articular injection of the pharmaceutical composition into the joint of the subject.

[0548] In some embodiments, the present disclosure provides a pharmaceutical composition for the treatment or prevention of a joint disease or condition, the composition including a therapeutically effective amount of one or more nucleic acids encoding a Clustered Regularly Interspaced Short Palindromic Repeats (CRISPR) gene-editing system. The system includes a CRISPR Associated Protein 9 (Cas9) protein, and at least one guide RNA targeting an GRN gene, wherein the target sequence is adjacent to a protospacer adjacent motif (PAM) sequence for the Cas9 protein. In some embodiments, the at least one guide RNA includes a crRNA sequence that is complementary to a target sequence in any one of exons of the GRN gene. In some embodiments, the at least one guide RNA includes a crRNA sequence that is complementary to a target sequence in one of exons disclosed herein of the GRN gene. In some embodiments, the at least one guide RNA has a crRNA sequence having at least 75% identity to a sequence selected from SEQ ID NOs: 3600-3624. In some embodiments, the at least one guide RNA has a crRNA sequence having at least 80% identity to a sequence selected from SEQ ID NOs: 3600-3624. In some embodiments, the at least one guide RNA has a crRNA sequence having at least 85% identity to a sequence selected from SEQ ID NOs: 3600-3624. In some embodiments, the at least one guide RNA has a crRNA sequence having at least 90% identity to a sequence selected from SEQ ID NOs: 3600-3624. In some embodiments, the at least one guide RNA has a crRNA sequence having at least 95% identity to a sequence selected from SEQ ID NOs: 3600-3624. In some embodiments, the at least one guide RNA has a crRNA sequence selected from SEQ ID NOs: 3600-3624.

[0549] In some embodiments, the present disclosure provides method for the treatment or prevention of a joint disease or condition in a subject in need thereof. The method includes administering, to a joint of the subject, a pharmaceutical composition including a pharmaceutically effective amount of a composition having one or more nucleic acids encoding a Clustered Regularly Interspaced Short Palindromic Repeats (CRISPR) gene-editing system. The system includes a CRISPR Associated Protein 9 (Cas9) protein, and at least one guide RNA targeting an GRN gene, wherein the target sequence is adjacent to a protospacer adjacent motif (PAM) sequence for the Cas9 protein. In some embodiments, the at least one guide RNA includes a crRNA sequence that is complementary to a target sequence in any one of exons of the GRN gene. In some embodiments, the at least one guide RNA includes a crRNA sequence that is complementary to a target sequence in one of exons disclosed herein of the GRN gene. In some embodiments, the at least one guide RNA has a crRNA sequence having at least 75% identity to a sequence selected from SEQ ID NOs: 3600-3624. In some embodiments, the at least one guide RNA has a crRNA sequence having at least 80% identity to a sequence selected from SEQ ID NOs: 3600-3624. In some embodiments, the at least one guide RNA has a crRNA sequence having at least 85% identity to a sequence selected from SEQ ID NOs: 3600-3624. In some embodiments, the at least one guide RNA has a crRNA sequence having at least 90% identity to a sequence selected from SEQ ID NOs: 3600-3624. In some embodiments, the at least one guide RNA has a crRNA sequence having at least 95% identity to a sequence selected from SEQ ID NOs: 3600-3624. In some embodiments, the at least one guide RNA has a crRNA sequence selected from SEQ ID NOs: 3600-3624. In some embodiments, the joint disease or condition is arthritis, e.g., osteoarthritis. In some embodiments, the administering includes intra-articular injection of the pharmaceutical composition into the joint of the subject.

[0550] In some embodiments, the present disclosure provides a pharmaceutical composition for the treatment or prevention of a joint disease or condition, the composition including a therapeutically effective amount of one or more nucleic acids encoding a Clustered Regularly Interspaced Short Palindromic Repeats (CRISPR) gene-editing system. The system includes a CRISPR Associated Protein 9 (Cas9) protein, and at least one guide RNA targeting an HCK gene, wherein the target sequence is adjacent to a protospacer adjacent motif (PAM) sequence for the Cas9 protein. In some embodiments, the at least one guide RNA includes a crRNA sequence that is complementary to a target sequence in any one of exons of the HCK gene. In some embodiments, the at least one guide RNA includes a crRNA sequence that is complementary to a target sequence in one of exons disclosed herein of the HCK gene. In some embodiments, the at least one guide RNA has a crRNA sequence having at least 75% identity to a sequence selected from SEQ ID NOs: 3625-3649. In some embodiments, the at least one guide RNA has a crRNA sequence having at least 80% identity to a sequence selected from SEQ ID NOs: 3625-3649. In some embodiments, the at least one guide RNA has a crRNA sequence having at least 85% identity to a sequence selected from SEQ ID NOs: 3625-3649. In some embodiments, the at least one guide RNA has a crRNA sequence having at least 90% identity to a sequence selected from SEQ ID NOs: 3625-3649. In some embodiments, the at least one guide RNA has a crRNA sequence having at least 95% identity to a sequence selected from SEQ ID NOs: 3625-3649. In some embodiments, the at least one guide RNA has a crRNA sequence selected from SEQ ID NOs: 3625-3649.

[0551] In some embodiments, the present disclosure provides method for the treatment or prevention of a joint disease or condition in a subject in need thereof. The method includes administering, to a joint of the subject, a pharmaceutical composition including a pharmaceutically effective amount of a composition having one or more nucleic acids encoding a Clustered Regularly Interspaced Short Palindromic Repeats (CRISPR) gene-editing system. The system includes a CRISPR Associated Protein 9 (Cas9) protein, and at least one guide RNA targeting an HCK gene, wherein the target sequence is adjacent to a protospacer adjacent motif (PAM) sequence for the Cas9 protein. In some embodiments, the at least one guide RNA includes a crRNA sequence that is complementary to a target sequence in any one of exons of the HCK gene. In some embodiments, the at least one guide RNA includes a crRNA sequence that is complementary to a target sequence in one of exons disclosed herein of the HCK gene. In some embodiments, the at least one guide RNA has a crRNA sequence having at least 75% identity to a sequence selected from SEQ ID NOs: 3625-3649. In some embodiments, the at least one guide RNA has a crRNA sequence having at least 80% identity to a sequence selected from SEQ ID NOs: 3625-3649. In some embodiments, the at least one guide RNA has a crRNA sequence having at least 85% identity to a sequence selected from SEQ ID NOs: 3625-3649. In some embodiments, the at least one guide RNA has a crRNA sequence having at least 90% identity to a sequence selected from SEQ ID NOs: 3625-3649. In some embodiments, the at least one guide RNA has a crRNA sequence having at least 95% identity to a sequence selected from SEQ ID NOs: 3625-3649. In some embodiments, the at least one guide RNA has a crRNA sequence selected from SEQ ID NOs: 3625-3649. In some embodiments, the joint disease or condition is arthritis, e.g., osteoarthritis. In some embodiments, the administering includes intra-articular injection of the pharmaceutical composition into the joint of the subject.

[0552] In some embodiments, the present disclosure provides a pharmaceutical composition for the treatment or prevention of a joint disease or condition, the composition including a therapeutically effective amount of one or more nucleic acids encoding a Clustered Regularly Interspaced Short Palindromic Repeats (CRISPR) gene-editing system. The system includes a CRISPR Associated Protein 9 (Cas9) protein, and at least one guide RNA targeting an HECW1 gene, wherein the target sequence is adjacent to a protospacer adjacent motif (PAM) sequence for the Cas9 protein. In some embodiments, the at least one guide RNA includes a crRNA sequence that is complementary to a target sequence in any one of exons of the HECW1 gene. In some embodiments, the at least one guide RNA includes a crRNA sequence that is complementary to a target sequence in one of exons disclosed herein of the HECW1 gene. In some embodiments, the at least one guide RNA has a crRNA sequence having at least 75% identity to a sequence selected from SEQ ID NOs: 3650-3674. In some embodiments, the at least one guide RNA has a crRNA sequence having at least 80% identity to a sequence selected from SEQ ID NOs: 3650-3674. In some embodiments, the at least one guide RNA has a crRNA sequence having at least 85% identity to a sequence selected from SEQ ID NOs: 3650-3674. In some embodiments, the at least one guide RNA has a crRNA sequence having at least 90% identity to a sequence selected from SEQ ID NOs: 3650-3674. In some embodiments, the at least one guide RNA has a crRNA sequence having at least 95% identity to a sequence selected from SEQ ID NOs: 3650-3674. In some embodiments, the at least one guide RNA has a crRNA sequence selected from SEQ ID NOs: 3650-3674.

[0553] In some embodiments, the present disclosure provides method for the treatment or prevention of a joint disease or condition in a subject in need thereof. The method includes administering, to a joint of the subject, a pharmaceutical composition including a pharmaceutically effective amount of a composition having one or more nucleic acids encoding a Clustered Regularly Interspaced Short Palindromic Repeats (CRISPR) gene-editing system. The system includes a CRISPR Associated Protein 9 (Cas9) protein, and at least one guide RNA targeting an HECW1 gene, wherein the target sequence is adjacent to a protospacer adjacent motif (PAM) sequence for the Cas9 protein. In some embodiments, the at least one guide RNA includes a crRNA sequence that is complementary to a target sequence in any one of exons of the HECW1 gene. In some embodiments, the at least one guide RNA includes a crRNA sequence that is complementary to a target sequence in one of exons disclosed herein of the HECW1 gene. In some embodiments, the at least one guide RNA has a crRNA sequence having at least 75% identity to a sequence selected from SEQ ID NOs: 3650-3674. In some embodiments, the at least one guide RNA has a crRNA sequence having at least 80% identity to a sequence selected from SEQ ID NOs: 3650-3674. In some embodiments, the at least one guide RNA has a crRNA sequence having at least 85% identity to a sequence selected from SEQ ID NOs: 3650-3674. In some embodiments, the at least one guide RNA has a crRNA sequence having at least 90% identity to a sequence selected from SEQ ID NOs: 3650-3674. In some embodiments, the at least one guide RNA has a crRNA sequence having at least 95% identity to a sequence selected from SEQ ID NOs: 3650-3674. In some embodiments, the at least one guide RNA has a crRNA sequence selected from SEQ ID NOs: 3650-3674. In some embodiments, the joint disease or condition is arthritis, e.g., osteoarthritis. In some embodiments, the administering includes intra-articular injection of the pharmaceutical composition into the joint of the subject.

[0554] In some embodiments, the present disclosure provides a pharmaceutical composition for the treatment or prevention of a joint disease or condition, the composition including a therapeutically effective amount of one or more nucleic acids encoding a Clustered Regularly Interspaced Short Palindromic Repeats (CRISPR) gene-editing system. The system includes a CRISPR Associated Protein 9 (Cas9) protein, and at least one guide RNA targeting an IFI30 gene, wherein the target sequence is adjacent to a protospacer adjacent motif (PAM) sequence for the Cas9 protein. In some embodiments, the at least one guide RNA includes a crRNA sequence that is complementary to a target sequence in any one of exons of the IFI30 gene. In some embodiments, the at least one guide RNA includes a crRNA sequence that is complementary to a target sequence in one of exons disclosed herein of the IFI30 gene. In some embodiments, the at least one guide RNA has a crRNA sequence having at least 75% identity to a sequence selected from SEQ ID NOs: 3675-3699. In some embodiments, the at least one guide RNA has a crRNA sequence having at least 80% identity to a sequence selected from SEQ ID NOs: 3675-3699. In some embodiments, the at least one guide RNA has a crRNA sequence having at least 85% identity to a sequence selected from SEQ ID NOs: 3675-3699. In some embodiments, the at least one guide RNA has a crRNA sequence having at least 90% identity to a sequence selected from SEQ ID NOs: 3675-3699. In some embodiments, the at least one guide RNA has a crRNA sequence having at least 95% identity to a sequence selected from SEQ ID NOs: 3675-3699. In some embodiments, the at least one guide RNA has a crRNA sequence selected from SEQ ID NOs: 3675-3699.

[0555] In some embodiments, the present disclosure provides method for the treatment or prevention of a joint disease or condition in a subject in need thereof. The method includes administering, to a joint of the subject, a pharmaceutical composition including a pharmaceutically effective amount of a composition having one or more nucleic acids encoding a Clustered Regularly Interspaced Short Palindromic Repeats (CRISPR) gene-editing system. The system includes a CRISPR Associated Protein 9 (Cas9) protein, and at least one guide RNA targeting an IFI30 gene, wherein the target sequence is adjacent to a protospacer adjacent motif (PAM) sequence for the Cas9 protein. In some embodiments, the at least one guide RNA includes a crRNA sequence that is complementary to a target sequence in any one of exons of the IFI30 gene. In some embodiments, the at least one guide RNA includes a crRNA sequence that is complementary to a target sequence in one of exons disclosed herein of the IFI30 gene. In some embodiments, the at least one guide RNA has a crRNA sequence having at least 75% identity to a sequence selected from SEQ ID NOs: 3675-3699. In some embodiments, the at least one guide RNA has a crRNA sequence having at least 80% identity to a sequence selected from SEQ ID NOs: 3675-3699. In some embodiments, the at least one guide RNA has a crRNA sequence having at least 85% identity to a sequence selected from SEQ ID NOs: 3675-3699. In some embodiments, the at least one guide RNA has a crRNA sequence having at least 90% identity to a sequence selected from SEQ ID NOs: 3675-3699. In some embodiments, the at least one guide RNA has a crRNA sequence having at least 95% identity to a sequence selected from SEQ ID NOs: 3675-3699. In some embodiments, the at least one guide RNA has a crRNA sequence selected from SEQ ID NOs: 3675-3699. In some embodiments, the joint disease or condition is arthritis, e.g., osteoarthritis. In some embodiments, the administering includes intra-articular injection of the pharmaceutical composition into the joint of the subject.

[0556] In some embodiments, the present disclosure provides a pharmaceutical composition for the treatment or prevention of a joint disease or condition, the composition including a therapeutically effective amount of one or more nucleic acids encoding a Clustered Regularly Interspaced Short Palindromic Repeats (CRISPR) gene-editing system. The system includes a CRISPR Associated Protein 9 (Cas9) protein, and at least one guide RNA targeting an IFI44L gene, wherein the target sequence is adjacent to a protospacer adjacent motif (PAM) sequence for the Cas9 protein. In some embodiments, the at least one guide RNA includes a crRNA sequence that is complementary to a target sequence in any one of exons of the IFI44L gene. In some embodiments, the at least one guide RNA includes a crRNA sequence that is complementary to a target sequence in one of exons disclosed herein of the IFI44L gene. In some embodiments, the at least one guide RNA has a crRNA sequence having at least 75% identity to a sequence selected from SEQ ID NOs: 3700-3724. In some embodiments, the at least one guide RNA has a crRNA sequence having at least 80% identity to a sequence selected from SEQ ID NOs: 3700-3724. In some embodiments, the at least one guide RNA has a crRNA sequence having at least 85% identity to a sequence selected from SEQ ID NOs: 3700-3724. In some embodiments, the at least one guide RNA has a crRNA sequence having at least 90% identity to a sequence selected from SEQ ID NOs: 3700-3724. In some embodiments, the at least one guide RNA has a crRNA sequence having at least 95% identity to a sequence selected from SEQ ID NOs: 3700-3724. In some embodiments, the at least one guide RNA has a crRNA sequence selected from SEQ ID NOs: 3700-3724.

[0557] In some embodiments, the present disclosure provides method for the treatment or prevention of a joint disease or condition in a subject in need thereof. The method includes administering, to a joint of the subject, a pharmaceutical composition including a pharmaceutically effective amount of a composition having one or more nucleic acids encoding a Clustered Regularly Interspaced Short Palindromic Repeats (CRISPR) gene-editing system. The system includes a CRISPR Associated Protein 9 (Cas9) protein, and at least one guide RNA targeting an IFI44L gene, wherein the target sequence is adjacent to a protospacer adjacent motif (PAM) sequence for the Cas9 protein. In some embodiments, the at least one guide RNA includes a crRNA sequence that is complementary to a target sequence in any one of exons of the IFI44L gene. In some embodiments, the at least one guide RNA includes a crRNA sequence that is complementary to a target sequence in one of exons disclosed herein of the IFI44L gene. In some embodiments, the at least one guide RNA has a crRNA sequence having at least 75% identity to a sequence selected from SEQ ID NOs: 3700-3724. In some embodiments, the at least one guide RNA has a crRNA sequence having at least 80% identity to a sequence selected from SEQ ID NOs: 3700-3724. In some embodiments, the at least one guide RNA has a crRNA sequence having at least 85% identity to a sequence selected from SEQ ID NOs: 3700-3724. In some embodiments, the at least one guide RNA has a crRNA sequence having at least 90% identity to a sequence selected from SEQ ID NOs: 3700-3724. In some embodiments, the at least one guide RNA has a crRNA sequence having at least 95% identity to a sequence selected from SEQ ID NOs: 3700-3724. In some embodiments, the at least one guide RNA has a crRNA sequence selected from SEQ ID NOs: 3700-3724. In some embodiments, the joint disease or condition is arthritis, e.g., osteoarthritis. In some embodiments, the administering includes intra-articular injection of the pharmaceutical composition into the joint of the subject.

[0558] In some embodiments, the present disclosure provides a pharmaceutical composition for the treatment or prevention of a joint disease or condition, the composition including a therapeutically effective amount of one or more nucleic acids encoding a Clustered Regularly Interspaced Short Palindromic Repeats (CRISPR) gene-editing system. The system includes a CRISPR Associated Protein 9 (Cas9) protein, and at least one guide RNA targeting an IFI6 gene, wherein the target sequence is adjacent to a protospacer adjacent motif (PAM) sequence for the Cas9 protein. In some embodiments, the at least one guide RNA includes a crRNA sequence that is complementary to a target sequence in any one of exons of the IFI6 gene. In some embodiments, the at least one guide RNA includes a crRNA sequence that is complementary to a target sequence in one of exons disclosed herein of the IFI6 gene. In some embodiments, the at least one guide RNA has a crRNA sequence having at least 75% identity to a sequence selected from SEQ ID NOs: 3725-3749. In some embodiments, the at least one guide RNA has a crRNA sequence having at least 80% identity to a sequence selected from SEQ ID NOs: 3725-3749. In some embodiments, the at least one guide RNA has a crRNA sequence having at least 85% identity to a sequence selected from SEQ ID NOs: 3725-3749. In some embodiments, the at least one guide RNA has a crRNA sequence having at least 90% identity to a sequence selected from SEQ ID NOs: 3725-3749. In some embodiments, the at least one guide RNA has a crRNA sequence having at least 95% identity to a sequence selected from SEQ ID NOs: 3725-3749. In some embodiments, the at least one guide RNA has a crRNA sequence selected from SEQ ID NOs: 3725-3749.

[0559] In some embodiments, the present disclosure provides method for the treatment or prevention of a joint disease or condition in a subject in need thereof. The method includes administering, to a joint of the subject, a pharmaceutical composition including a pharmaceutically effective amount of a composition having one or more nucleic acids encoding a Clustered Regularly Interspaced Short Palindromic Repeats (CRISPR) gene-editing system. The system includes a CRISPR Associated Protein 9 (Cas9) protein, and at least one guide RNA targeting an IFI6 gene, wherein the target sequence is adjacent to a protospacer adjacent motif (PAM) sequence for the Cas9 protein. In some embodiments, the at least one guide RNA includes a crRNA sequence that is complementary to a target sequence in any one of exons of the IFI6 gene. In some embodiments, the at least one guide RNA includes a crRNA sequence that is complementary to a target sequence in one of exons disclosed herein of the IFI6 gene. In some embodiments, the at least one guide RNA has a crRNA sequence having at least 75% identity to a sequence selected from SEQ ID NOs: 3725-3749. In some embodiments, the at least one guide RNA has a crRNA sequence having at least 80% identity to a sequence selected from SEQ ID NOs: 3725-3749. In some embodiments, the at least one guide RNA has a crRNA sequence having at least 85% identity to a sequence selected from SEQ ID NOs: 3725-3749. In some embodiments, the at least one guide RNA has a crRNA sequence having at least 90% identity to a sequence selected from SEQ ID NOs: 3725-3749. In some embodiments, the at least one guide RNA has a crRNA sequence having at least 95% identity to a sequence selected from SEQ ID NOs: 3725-3749. In some embodiments, the at least one guide RNA has a crRNA sequence selected from SEQ ID NOs: 3725-3749. In some embodiments, the joint disease or condition is arthritis, e.g., osteoarthritis. In some embodiments, the administering includes intra-articular injection of the pharmaceutical composition into the joint of the subject.

[0560] In some embodiments, the present disclosure provides a pharmaceutical composition for the treatment or prevention of a joint disease or condition, the composition including a therapeutically effective amount of one or more nucleic acids encoding a Clustered Regularly Interspaced Short Palindromic Repeats (CRISPR) gene-editing system. The system includes a CRISPR Associated Protein 9 (Cas9) protein, and at least one guide RNA targeting an IFITM1 gene, wherein the target sequence is adjacent to a protospacer adjacent motif (PAM) sequence for the Cas9 protein. In some embodiments, the at least one guide RNA includes a crRNA sequence that is complementary to a target sequence in any one of exons of the IFITM1 gene. In some embodiments, the at least one guide RNA includes a crRNA sequence that is complementary to a target sequence in one of exons disclosed herein of the IFITM1 gene. In some embodiments, the at least one guide RNA has a crRNA sequence having at least 75% identity to a sequence selected from SEQ ID NOs: 3750-3774. In some embodiments, the at least one guide RNA has a crRNA sequence having at least 80% identity to a sequence selected from SEQ ID NOs: 3750-3774. In some embodiments, the at least one guide RNA has a crRNA sequence having at least 85% identity to a sequence selected from SEQ ID NOs: 3750-3774. In some embodiments, the at least one guide RNA has a crRNA sequence having at least 90% identity to a sequence selected from SEQ ID NOs: 3750-3774. In some embodiments, the at least one guide RNA has a crRNA sequence having at least 95% identity to a sequence selected from SEQ ID NOs: 3750-3774. In some embodiments, the at least one guide RNA has a crRNA sequence selected from SEQ ID NOs: 3750-3774.

[0561] In some embodiments, the present disclosure provides method for the treatment or prevention of a joint disease or condition in a subject in need thereof. The method includes administering, to a joint of the subject, a pharmaceutical composition including a pharmaceutically effective amount of a composition having one or more nucleic acids encoding a Clustered Regularly Interspaced Short Palindromic Repeats (CRISPR) gene-editing system. The system includes a CRISPR Associated Protein 9 (Cas9) protein, and at least one guide RNA targeting an IFITM1 gene, wherein the target sequence is adjacent to a protospacer adjacent motif (PAM) sequence for the Cas9 protein. In some embodiments, the at least one guide RNA includes a crRNA sequence that is complementary to a target sequence in any one of exons of the IFITM1 gene. In some embodiments, the at least one guide RNA includes a crRNA sequence that is complementary to a target sequence in one of exons disclosed herein of the IFITM1 gene. In some embodiments, the at least one guide RNA has a crRNA sequence having at least 75% identity to a sequence selected from SEQ ID NOs: 3750-3774. In some embodiments, the at least one guide RNA has a crRNA sequence having at least 80% identity to a sequence selected from SEQ ID NOs: 3750-3774. In some embodiments, the at least one guide RNA has a crRNA sequence having at least 85% identity to a sequence selected from SEQ ID NOs: 3750-3774. In some embodiments, the at least one guide RNA has a crRNA sequence having at least 90% identity to a sequence selected from SEQ ID NOs: 3750-3774. In some embodiments, the at least one guide RNA has a crRNA sequence having at least 95% identity to a sequence selected from SEQ ID NOs: 3750-3774. In some embodiments, the at least one guide RNA has a crRNA sequence selected from SEQ ID NOs: 3750-3774. In some embodiments, the joint disease or condition is arthritis, e.g., osteoarthritis. In some embodiments, the administering includes intra-articular injection of the pharmaceutical composition into the joint of the subject.

[0562] In some embodiments, the present disclosure provides a pharmaceutical composition for the treatment or prevention of a joint disease or condition, the composition including a therapeutically effective amount of one or more nucleic acids encoding a Clustered Regularly Interspaced Short Palindromic Repeats (CRISPR) gene-editing system. The system includes a CRISPR Associated Protein 9 (Cas9) protein, and at least one guide RNA targeting an IFITM3 gene, wherein the target sequence is adjacent to a protospacer adjacent motif (PAM) sequence for the Cas9 protein. In some embodiments, the at least one guide RNA includes a crRNA sequence that is complementary to a target sequence in any one of exons of the IFITM3 gene. In some embodiments, the at least one guide RNA includes a crRNA sequence that is complementary to a target sequence in one of exons disclosed herein of the IFITM3 gene. In some embodiments, the at least one guide RNA has a crRNA sequence having at least 75% identity to a sequence selected from SEQ ID NOs: 3775-3799. In some embodiments, the at least one guide RNA has a crRNA sequence having at least 80% identity to a sequence selected from SEQ ID NOs: 3775-3799. In some embodiments, the at least one guide RNA has a crRNA sequence having at least 85% identity to a sequence selected from SEQ ID NOs: 3775-3799. In some embodiments, the at least one guide RNA has a crRNA sequence having at least 90% identity to a sequence selected from SEQ ID NOs: 3775-3799. In some embodiments, the at least one guide RNA has a crRNA sequence having at least 95% identity to a sequence selected from SEQ ID NOs: 3775-3799. In some embodiments, the at least one guide RNA has a crRNA sequence selected from SEQ ID NOs: 3775-3799.

[0563] In some embodiments, the present disclosure provides method for the treatment or prevention of a joint disease or condition in a subject in need thereof. The method includes administering, to a joint of the subject, a pharmaceutical composition including a pharmaceutically effective amount of a composition having one or more nucleic acids encoding a Clustered Regularly Interspaced Short Palindromic Repeats (CRISPR) gene-editing system. The system includes a CRISPR Associated Protein 9 (Cas9) protein, and at least one guide RNA targeting an IFITM3 gene, wherein the target sequence is adjacent to a protospacer adjacent motif (PAM) sequence for the Cas9 protein. In some embodiments, the at least one guide RNA includes a crRNA sequence that is complementary to a target sequence in any one of exons of the IFITM3 gene. In some embodiments, the at least one guide RNA includes a crRNA sequence that is complementary to a target sequence in one of exons disclosed herein of the IFITM3 gene. In some embodiments, the at least one guide RNA has a crRNA sequence having at least 75% identity to a sequence selected from SEQ ID NOs: 3775-3799. In some embodiments, the at least one guide RNA has a crRNA sequence having at least 80% identity to a sequence selected from SEQ ID NOs: 3775-3799. In some embodiments, the at least one guide RNA has a crRNA sequence having at least 85% identity to a sequence selected from SEQ ID NOs: 3775-3799. In some embodiments, the at least one guide RNA has a crRNA sequence having at least 90% identity to a sequence selected from SEQ ID NOs: 3775-3799. In some embodiments, the at least one guide RNA has a crRNA sequence having at least 95% identity to a sequence selected from SEQ ID NOs: 3775-3799. In some embodiments, the at least one guide RNA has a crRNA sequence selected from SEQ ID NOs: 3775-3799. In some embodiments, the joint disease or condition is arthritis, e.g., osteoarthritis. In some embodiments, the administering includes intra-articular injection of the pharmaceutical composition into the joint of the subject.

[0564] In some embodiments, the present disclosure provides a pharmaceutical composition for the treatment or prevention of a joint disease or condition, the composition including a therapeutically effective amount of one or more nucleic acids encoding a Clustered Regularly Interspaced Short Palindromic Repeats (CRISPR) gene-editing system. The system includes a CRISPR Associated Protein 9 (Cas9) protein, and at least one guide RNA targeting an IFITM2 gene, wherein the target sequence is adjacent to a protospacer adjacent motif (PAM) sequence for the Cas9 protein. In some embodiments, the at least one guide RNA includes a crRNA sequence that is complementary to a target sequence in any one of exons of the IFITM2 gene. In some embodiments, the at least one guide RNA includes a crRNA sequence that is complementary to a target sequence in one of exons disclosed herein of the IFITM2 gene. In some embodiments, the at least one guide RNA has a crRNA sequence having at least 75% identity to a sequence selected from SEQ ID NOs: 3800-3824. In some embodiments, the at least one guide RNA has a crRNA sequence having at least 80% identity to a sequence selected from SEQ ID NOs: 3800-3824. In some embodiments, the at least one guide RNA has a crRNA sequence having at least 85% identity to a sequence selected from SEQ ID NOs: 3800-3824. In some embodiments, the at least one guide RNA has a crRNA sequence having at least 90% identity to a sequence selected from SEQ ID NOs: 3800-3824. In some embodiments, the at least one guide RNA has a crRNA sequence having at least 95% identity to a sequence selected from SEQ ID NOs: 3800-3824. In some embodiments, the at least one guide RNA has a crRNA sequence selected from SEQ ID NOs: 3800-3824.

[0565] In some embodiments, the present disclosure provides method for the treatment or prevention of a joint disease or condition in a subject in need thereof. The method includes administering, to a joint of the subject, a pharmaceutical composition including a pharmaceutically effective amount of a composition having one or more nucleic acids encoding a Clustered Regularly Interspaced Short Palindromic Repeats (CRISPR) gene-editing system. The system includes a CRISPR Associated Protein 9 (Cas9) protein, and at least one guide RNA targeting an IFITM2 gene, wherein the target sequence is adjacent to a protospacer adjacent motif (PAM) sequence for the Cas9 protein. In some embodiments, the at least one guide RNA includes a crRNA sequence that is complementary to a target sequence in any one of exons of the IFITM2 gene. In some embodiments, the at least one guide RNA includes a crRNA sequence that is complementary to a target sequence in one of exons disclosed herein of the IFITM2 gene. In some embodiments, the at least one guide RNA has a crRNA sequence having at least 75% identity to a sequence selected from SEQ ID NOs: 3800-3824. In some embodiments, the at least one guide RNA has a crRNA sequence having at least 80% identity to a sequence selected from SEQ ID NOs: 3800-3824. In some embodiments, the at least one guide RNA has a crRNA sequence having at least 85% identity to a sequence selected from SEQ ID NOs: 3800-3824. In some embodiments, the at least one guide RNA has a crRNA sequence having at least 90% identity to a sequence selected from SEQ ID NOs: 3800-3824. In some embodiments, the at least one guide RNA has a crRNA sequence having at least 95% identity to a sequence selected from SEQ ID NOs: 3800-3824. In some embodiments, the at least one guide RNA has a crRNA sequence selected from SEQ ID NOs: 3800-3824. In some embodiments, the joint disease or condition is arthritis, e.g., osteoarthritis. In some embodiments, the administering includes intra-articular injection of the pharmaceutical composition into the joint of the subject.

[0566] In some embodiments, the present disclosure provides a pharmaceutical composition for the treatment or prevention of a joint disease or condition, the composition including a therapeutically effective amount of one or more nucleic acids encoding a Clustered Regularly Interspaced Short Palindromic Repeats (CRISPR) gene-editing system. The system includes a CRISPR Associated Protein 9 (Cas9) protein, and at least one guide RNA targeting an IL18 gene, wherein the target sequence is adjacent to a protospacer adjacent motif (PAM) sequence for the Cas9 protein. In some embodiments, the at least one guide RNA includes a crRNA sequence that is complementary to a target sequence in any one of exons of the IL18 gene. In some embodiments, the at least one guide RNA includes a crRNA sequence that is complementary to a target sequence in one of exons disclosed herein of the IL18 gene. In some embodiments, the at least one guide RNA has a crRNA sequence having at least 75% identity to a sequence selected from SEQ ID NOs: 3825-3849. In some embodiments, the at least one guide RNA has a crRNA sequence having at least 80% identity to a sequence selected from SEQ ID NOs: 3825-3849. In some embodiments, the at least one guide RNA has a crRNA sequence having at least 85% identity to a sequence selected from SEQ ID NOs: 3825-3849. In some embodiments, the at least one guide RNA has a crRNA sequence having at least 90% identity to a sequence selected from SEQ ID NOs: 3825-3849. In some embodiments, the at least one guide RNA has a crRNA sequence having at least 95% identity to a sequence selected from SEQ ID NOs: 3825-3849. In some embodiments, the at least one guide RNA has a crRNA sequence selected from SEQ ID NOs: 3825-3849.

[0567] In some embodiments, the present disclosure provides method for the treatment or prevention of a joint disease or condition in a subject in need thereof. The method includes administering, to a joint of the subject, a pharmaceutical composition including a pharmaceutically effective amount of a composition having one or more nucleic acids encoding a Clustered Regularly Interspaced Short Palindromic Repeats (CRISPR) gene-editing system. The system includes a CRISPR Associated Protein 9 (Cas9) protein, and at least one guide RNA targeting an IL18 gene, wherein the target sequence is adjacent to a protospacer adjacent motif (PAM) sequence for the Cas9 protein. In some embodiments, the at least one guide RNA includes a crRNA sequence that is complementary to a target sequence in any one of exons of the IL18 gene. In some embodiments, the at least one guide RNA includes a crRNA sequence that is complementary to a target sequence in one of exons disclosed herein of the IL18 gene. In some embodiments, the at least one guide RNA has a crRNA sequence having at least 75% identity to a sequence selected from SEQ ID NOs: 3825-3849. In some embodiments, the at least one guide RNA has a crRNA sequence having at least 80% identity to a sequence selected from SEQ ID NOs: 3825-3849. In some embodiments, the at least one guide RNA has a crRNA sequence having at least 85% identity to a sequence selected from SEQ ID NOs: 3825-3849. In some embodiments, the at least one guide RNA has a crRNA sequence having at least 90% identity to a sequence selected from SEQ ID NOs: 3825-3849. In some embodiments, the at least one guide RNA has a crRNA sequence having at least 95% identity to a sequence selected from SEQ ID NOs: 3825-3849. In some embodiments, the at least one guide RNA has a crRNA sequence selected from SEQ ID NOs: 3825-3849. In some embodiments, the joint disease or condition is arthritis, e.g., osteoarthritis. In some embodiments, the administering includes intra-articular injection of the pharmaceutical composition into the joint of the subject.

[0568] In some embodiments, the present disclosure provides a pharmaceutical composition for the treatment or prevention of a joint disease or condition, the composition including a therapeutically effective amount of one or more nucleic acids encoding a Clustered Regularly Interspaced Short Palindromic Repeats (CRISPR) gene-editing system. The system includes a CRISPR Associated Protein 9 (Cas9) protein, and at least one guide RNA targeting an ILIA gene, wherein the target sequence is adjacent to a protospacer adjacent motif (PAM) sequence for the Cas9 protein. In some embodiments, the at least one guide RNA includes a crRNA sequence that is complementary to a target sequence in any one of exons of the ILIA gene. In some embodiments, the at least one guide RNA includes a crRNA sequence that is complementary to a target sequence in one of exons disclosed herein of the ILIA gene. In some embodiments, the at least one guide RNA has a crRNA sequence having at least 75% identity to a sequence selected from SEQ ID NOs: 3850-3874. In some embodiments, the at least one guide RNA has a crRNA sequence having at least 80% identity to a sequence selected from SEQ ID NOs: 3850-3874. In some embodiments, the at least one guide RNA has a crRNA sequence having at least 85% identity to a sequence selected from SEQ ID NOs: 3850-3874. In some embodiments, the at least one guide RNA has a crRNA sequence having at least 90% identity to a sequence selected from SEQ ID NOs: 3850-3874. In some embodiments, the at least one guide RNA has a crRNA sequence having at least 95% identity to a sequence selected from SEQ ID NOs: 3850-3874. In some embodiments, the at least one guide RNA has a crRNA sequence selected from SEQ ID NOs: 3850-3874.

[0569] In some embodiments, the present disclosure provides method for the treatment or prevention of a joint disease or condition in a subject in need thereof. The method includes administering, to a joint of the subject, a pharmaceutical composition including a pharmaceutically effective amount of a composition having one or more nucleic acids encoding a Clustered Regularly Interspaced Short Palindromic Repeats (CRISPR) gene-editing system. The system includes a CRISPR Associated Protein 9 (Cas9) protein, and at least one guide RNA targeting an ILIA gene, wherein the target sequence is adjacent to a protospacer adjacent motif (PAM) sequence for the Cas9 protein. In some embodiments, the at least one guide RNA includes a crRNA sequence that is complementary to a target sequence in any one of exons of the ILIA gene. In some embodiments, the at least one guide RNA includes a crRNA sequence that is complementary to a target sequence in one of exons disclosed herein of the ILIA gene. In some embodiments, the at least one guide RNA has a crRNA sequence having at least 75% identity to a sequence selected from SEQ ID NOs: 3850-3874. In some embodiments, the at least one guide RNA has a crRNA sequence having at least 80% identity to a sequence selected from SEQ ID NOs: 3850-3874. In some embodiments, the at least one guide RNA has a crRNA sequence having at least 85% identity to a sequence selected from SEQ ID NOs: 3850-3874. In some embodiments, the at least one guide RNA has a crRNA sequence having at least 90% identity to a sequence selected from SEQ ID NOs: 3850-3874. In some embodiments, the at least one guide RNA has a crRNA sequence having at least 95% identity to a sequence selected from SEQ ID NOs: 3850-3874. In some embodiments, the at least one guide RNA has a crRNA sequence selected from SEQ ID NOs: 3850-3874. In some embodiments, the joint disease or condition is arthritis, e.g., osteoarthritis. In some embodiments, the administering includes intra-articular injection of the pharmaceutical composition into the joint of the subject.

[0570] In some embodiments, the present disclosure provides a pharmaceutical composition for the treatment or prevention of a joint disease or condition, the composition including a therapeutically effective amount of one or more nucleic acids encoding a Clustered Regularly Interspaced Short Palindromic Repeats (CRISPR) gene-editing system. The system includes a CRISPR Associated Protein 9 (Cas9) protein, and at least one guide RNA targeting an IL1B gene, wherein the target sequence is adjacent to a protospacer adjacent motif (PAM) sequence for the Cas9 protein. In some embodiments, the at least one guide RNA includes a crRNA sequence that is complementary to a target sequence in any one of exons of the IL1B gene. In some embodiments, the at least one guide RNA includes a crRNA sequence that is complementary to a target sequence in one of exons disclosed herein of the IL1B gene. In some embodiments, the at least one guide RNA has a crRNA sequence having at least 75% identity to a sequence selected from SEQ ID NOs: 3875-3899. In some embodiments, the at least one guide RNA has a crRNA sequence having at least 80% identity to a sequence selected from SEQ ID NOs: 3875-3899. In some embodiments, the at least one guide RNA has a crRNA sequence having at least 85% identity to a sequence selected from SEQ ID NOs: 3875-3899. In some embodiments, the at least one guide RNA has a crRNA sequence having at least 90% identity to a sequence selected from SEQ ID NOs: 3875-3899. In some embodiments, the at least one guide RNA has a crRNA sequence having at least 95% identity to a sequence selected from SEQ ID NOs: 3875-3899. In some embodiments, the at least one guide RNA has a crRNA sequence selected from SEQ ID NOs: 3875-3899.

[0571] In some embodiments, the present disclosure provides method for the treatment or prevention of a joint disease or condition in a subject in need thereof. The method includes administering, to a joint of the subject, a pharmaceutical composition including a pharmaceutically effective amount of a composition having one or more nucleic acids encoding a Clustered Regularly Interspaced Short Palindromic Repeats (CRISPR) gene-editing system. The system includes a CRISPR Associated Protein 9 (Cas9) protein, and at least one guide RNA targeting an IL1B gene, wherein the target sequence is adjacent to a protospacer adjacent motif (PAM) sequence for the Cas9 protein. In some embodiments, the at least one guide RNA includes a crRNA sequence that is complementary to a target sequence in any one of exons of the IL1B gene. In some embodiments, the at least one guide RNA includes a crRNA sequence that is complementary to a target sequence in one of exons disclosed herein of the IL1B gene. In some embodiments, the at least one guide RNA has a crRNA sequence having at least 75% identity to a sequence selected from SEQ ID NOs: 3875-3899. In some embodiments, the at least one guide RNA has a crRNA sequence having at least 80% identity to a sequence selected from SEQ ID NOs: 3875-3899. In some embodiments, the at least one guide RNA has a crRNA sequence having at least 85% identity to a sequence selected from SEQ ID NOs: 3875-3899. In some embodiments, the at least one guide RNA has a crRNA sequence having at least 90% identity to a sequence selected from SEQ ID NOs: 3875-3899. In some embodiments, the at least one guide RNA has a crRNA sequence having at least 95% identity to a sequence selected from SEQ ID NOs: 3875-3899. In some embodiments, the at least one guide RNA has a crRNA sequence selected from SEQ ID NOs: 3875-3899. In some embodiments, the joint disease or condition is arthritis, e.g., osteoarthritis. In some embodiments, the administering includes intra-articular injection of the pharmaceutical composition into the joint of the subject.

[0572] In some embodiments, the present disclosure provides a pharmaceutical composition for the treatment or prevention of a joint disease or condition, the composition including a therapeutically effective amount of one or more nucleic acids encoding a Clustered Regularly Interspaced Short Palindromic Repeats (CRISPR) gene-editing system. The system includes a CRISPR Associated Protein 9 (Cas9) protein, and at least one guide RNA targeting an IFNG gene, wherein the target sequence is adjacent to a protospacer adjacent motif (PAM) sequence for the Cas9 protein. In some embodiments, the at least one guide RNA includes a crRNA sequence that is complementary to a target sequence in any one of exons of the IFNG gene. In some embodiments, the at least one guide RNA includes a crRNA sequence that is complementary to a target sequence in one of exons disclosed herein of the IFNG gene. In some embodiments, the at least one guide RNA has a crRNA sequence having at least 75% identity to a sequence selected from SEQ ID NOs: 3900-3922. In some embodiments, the at least one guide RNA has a crRNA sequence having at least 80% identity to a sequence selected from SEQ ID NOs: 3900-3922. In some embodiments, the at least one guide RNA has a crRNA sequence having at least 85% identity to a sequence selected from SEQ ID NOs: 3900-3922. In some embodiments, the at least one guide RNA has a crRNA sequence having at least 90% identity to a sequence selected from SEQ ID NOs: 3900-3922. In some embodiments, the at least one guide RNA has a crRNA sequence having at least 95% identity to a sequence selected from SEQ ID NOs: 3900-3922. In some embodiments, the at least one guide RNA has a crRNA sequence selected from SEQ ID NOs: 3900-3922.

[0573] In some embodiments, the present disclosure provides method for the treatment or prevention of a joint disease or condition in a subject in need thereof. The method includes administering, to a joint of the subject, a pharmaceutical composition including a pharmaceutically effective amount of a composition having one or more nucleic acids encoding a Clustered Regularly Interspaced Short Palindromic Repeats (CRISPR) gene-editing system. The system includes a CRISPR Associated Protein 9 (Cas9) protein, and at least one guide RNA targeting an IFNG gene, wherein the target sequence is adjacent to a protospacer adjacent motif (PAM) sequence for the Cas9 protein. In some embodiments, the at least one guide RNA includes a crRNA sequence that is complementary to a target sequence in any one of exons of the IFNG gene. In some embodiments, the at least one guide RNA includes a crRNA sequence that is complementary to a target sequence in one of exons disclosed herein of the IFNG gene. In some embodiments, the at least one guide RNA has a crRNA sequence having at least 75% identity to a sequence selected from SEQ ID NOs: 3900-3922. In some embodiments, the at least one guide RNA has a crRNA sequence having at least 80% identity to a sequence selected from SEQ ID NOs: 3900-3922. In some embodiments, the at least one guide RNA has a crRNA sequence having at least 85% identity to a sequence selected from SEQ ID NOs: 3900-3922. In some embodiments, the at least one guide RNA has a crRNA sequence having at least 90% identity to a sequence selected from SEQ ID NOs: 3900-3922. In some embodiments, the at least one guide RNA has a crRNA sequence having at least 95% identity to a sequence selected from SEQ ID NOs: 3900-3922. In some embodiments, the at least one guide RNA has a crRNA sequence selected from SEQ ID NOs: 3900-3922. In some embodiments, the joint disease or condition is arthritis, e.g., osteoarthritis. In some embodiments, the administering includes intra-articular injection of the pharmaceutical composition into the joint of the subject.

[0574] In some embodiments, the present disclosure provides a pharmaceutical composition for the treatment or prevention of a joint disease or condition, the composition including a therapeutically effective amount of one or more nucleic acids encoding a Clustered Regularly Interspaced Short Palindromic Repeats (CRISPR) gene-editing system. The system includes a CRISPR Associated Protein 9 (Cas9) protein, and at least one guide RNA targeting an IL12A gene, wherein the target sequence is adjacent to a protospacer adjacent motif (PAM) sequence for the Cas9 protein. In some embodiments, the at least one one of exons of the IL12A gene. In some embodiments, the at least one guide RNA includes a crRNA sequence that is complementary to a target sequence in one of exons disclosed herein of the IL12A gene. In some embodiments, the at least one guide RNA has a crRNA sequence having at least 75% identity to a sequence selected from SEQ ID NOs: 3923-3947. In some embodiments, the at least one guide RNA has a crRNA sequence having at least 80% identity to a sequence selected from SEQ ID NOs: 3923-3947. In some embodiments, the at least one guide RNA has a crRNA sequence having at least 85% identity to a sequence selected from SEQ ID NOs: 3923-3947. In some embodiments, the at least one guide RNA has a crRNA sequence having at least 90% identity to a sequence selected from SEQ ID NOs: 3923-3947. In some embodiments, the at least one guide RNA has a crRNA sequence having at least 95% identity to a sequence selected from SEQ ID NOs: 3923-3947. In some embodiments, the at least one guide RNA has a crRNA sequence selected from SEQ ID NOs: 3923-3947.

[0575] In some embodiments, the present disclosure provides method for the treatment or prevention of a joint disease or condition in a subject in need thereof. The method includes administering, to a joint of the subject, a pharmaceutical composition including a pharmaceutically effective amount of a composition having one or more nucleic acids encoding a Clustered Regularly Interspaced Short Palindromic Repeats (CRISPR) gene-editing system. The system includes a CRISPR Associated Protein 9 (Cas9) protein, and at least one guide RNA targeting an IL12A gene, wherein the target sequence is adjacent to a protospacer adjacent motif (PAM) sequence for the Cas9 protein. In some embodiments, the at least one guide RNA includes a crRNA sequence that is complementary to a target sequence in any one of exons of the IL12A gene. In some embodiments, the at least one guide RNA includes a crRNA sequence that is complementary to a target sequence in one of exons disclosed herein of the IL12A gene. In some embodiments, the at least one guide RNA has a crRNA sequence having at least 75% identity to a sequence selected from SEQ ID NOs: 3923-3947. In some embodiments, the at least one guide RNA has a crRNA sequence having at least 80% identity to a sequence selected from SEQ ID NOs: 3923-3947. In some embodiments, the at least one guide RNA has a crRNA sequence having at least 85% identity to a sequence selected from SEQ ID NOs: 3923-3947. In some embodiments, the at least one guide RNA has a crRNA sequence having at least 90% identity to a sequence selected from SEQ ID NOs: 3923-3947. In some embodiments, the at least one guide RNA has a crRNA sequence having at least 95% identity to a sequence selected from SEQ ID NOs: 3923-3947. In some embodiments, the at least one guide RNA has a crRNA sequence selected from SEQ ID NOs: 3923-3947. In some embodiments, the joint disease or condition is arthritis, e.g., osteoarthritis. In some embodiments, the administering includes intra-articular injection of the pharmaceutical composition into the joint of the subject.

[0576] In some embodiments, the present disclosure provides a pharmaceutical composition for the treatment or prevention of a joint disease or condition, the composition including a therapeutically effective amount of one or more nucleic acids encoding a Clustered Regularly Interspaced Short Palindromic Repeats (CRISPR) gene-editing system. The system includes a CRISPR Associated Protein 9 (Cas9) protein, and at least one guide RNA targeting an IL12B gene, wherein the target sequence is adjacent to a protospacer adjacent motif (PAM) sequence for the Cas9 protein. In some embodiments, the at least one guide RNA includes a crRNA sequence that is complementary to a target sequence in any one of exons of the IL12B gene. In some embodiments, the at least one guide RNA includes a crRNA sequence that is complementary to a target sequence in one of exons disclosed herein of the IL12B gene. In some embodiments, the at least one guide RNA has a crRNA sequence having at least 75% identity to a sequence selected from SEQ ID NOs: 3948-3972. In some embodiments, the at least one guide RNA has a crRNA sequence having at least 80% identity to a sequence selected from SEQ ID NOs: 3948-3972. In some embodiments, the at least one guide RNA has a crRNA sequence having at least 85% identity to a sequence selected from SEQ ID NOs: 3948-3972. In some embodiments, the at least one guide RNA has a crRNA sequence having at least 90% identity to a sequence selected from SEQ ID NOs: 3948-3972. In some embodiments, the at least one guide RNA has a crRNA sequence having at least 95% identity to a sequence selected from SEQ ID NOs: 3948-3972. In some embodiments, the at least one guide RNA has a crRNA sequence selected from SEQ ID NOs: 3948-3972.

[0577] In some embodiments, the present disclosure provides method for the treatment or prevention of a joint disease or condition in a subject in need thereof. The method includes administering, to a joint of the subject, a pharmaceutical composition including a pharmaceutically effective amount of a composition having one or more nucleic acids encoding a Clustered Regularly Interspaced Short Palindromic Repeats (CRISPR) gene-editing system. The system includes a CRISPR Associated Protein 9 (Cas9) protein, and at least one guide RNA targeting an IL12B gene, wherein the target sequence is adjacent to a protospacer adjacent motif (PAM) sequence for the Cas9 protein. In some embodiments, the at least one guide RNA includes a crRNA sequence that is complementary to a target sequence in any one of exons of the IL12B gene. In some embodiments, the at least one guide RNA includes a crRNA sequence that is complementary to a target sequence in one of exons disclosed herein of the IL12B gene. In some embodiments, the at least one guide RNA has a crRNA sequence having at least 75% identity to a sequence selected from SEQ ID NOs: 3948-3972. In some embodiments, the at least one guide RNA has a crRNA sequence having at least 80% identity to a sequence selected from SEQ ID NOs: 3948-3972. In some embodiments, the at least one guide RNA has a crRNA sequence having at least 85% identity to a sequence selected from SEQ ID NOs: 3948-3972. In some embodiments, the at least one guide RNA has a crRNA sequence having at least 90% identity to a sequence selected from SEQ ID NOs: 3948-3972. In some embodiments, the at least one guide RNA has a crRNA sequence having at least 95% identity to a sequence selected from SEQ ID NOs: 3948-3972. In some embodiments, the at least one guide RNA has a crRNA sequence selected from SEQ ID NOs: 3948-3972. In some embodiments, the joint disease or condition is arthritis, e.g., osteoarthritis. In some embodiments, the administering includes intra-articular injection of the pharmaceutical composition into the joint of the subject.

[0578] In some embodiments, the present disclosure provides a pharmaceutical composition for the treatment or prevention of a joint disease or condition, the composition including a therapeutically effective amount of one or more nucleic acids encoding a Clustered Regularly Interspaced Short Palindromic Repeats (CRISPR) gene-editing system. The system includes a CRISPR Associated Protein 9 (Cas9) protein, and at least one guide RNA targeting an IRF1 gene, wherein the target sequence is adjacent to a protospacer adjacent motif (PAM) sequence for the Cas9 protein. In some embodiments, the at least one guide RNA includes a crRNA sequence that is complementary to a target sequence in any one of exons of the IRF1 gene. In some embodiments, the at least one guide RNA includes a crRNA sequence that is complementary to a target sequence in one of exons disclosed herein of the IRF1 gene. In some embodiments, the at least one guide RNA has a crRNA sequence having at least 75% identity to a sequence selected from SEQ ID NOs: 3973-3997. In some embodiments, the at least one guide RNA has a crRNA sequence having at least 80% identity to a sequence selected from SEQ ID NOs: 3973-3997. In some embodiments, the at least one guide RNA has a crRNA sequence having at least 85% identity to a sequence selected from SEQ ID NOs: 3973-3997. In some embodiments, the at least one guide RNA has a crRNA sequence having at least 90% identity to a sequence selected from SEQ ID NOs: 3973-3997. In some embodiments, the at least one guide RNA has a crRNA sequence having at least 95% identity to a sequence selected from SEQ ID NOs: 3973-3997. In some embodiments, the at least one guide RNA has a crRNA sequence selected from SEQ ID NOs: 3973-3997.

[0579] In some embodiments, the present disclosure provides method for the treatment or prevention of a joint disease or condition in a subject in need thereof. The method includes administering, to a joint of the subject, a pharmaceutical composition including a pharmaceutically effective amount of a composition having one or more nucleic acids encoding a Clustered Regularly Interspaced Short Palindromic Repeats (CRISPR) gene-editing system. The system includes a CRISPR Associated Protein 9 (Cas9) protein, and at least one guide RNA targeting an IRF1 gene, wherein the target sequence is adjacent to a protospacer adjacent motif (PAM) sequence for the Cas9 protein. In some embodiments, the at least one guide RNA includes a crRNA sequence that is complementary to a target sequence in any one of exons of the IRF1 gene. In some embodiments, the at least one guide RNA includes a crRNA sequence that is complementary to a target sequence in one of exons disclosed herein of the IRF1 gene. In some embodiments, the at least one guide RNA has a crRNA sequence having at least 75% identity to a sequence selected from SEQ ID NOs: 3973-3997. In some embodiments, the at least one guide RNA has a crRNA sequence having at least 80% identity to a sequence selected from SEQ ID NOs: 3973-3997. In some embodiments, the at least one guide RNA has a crRNA sequence having at least 85% identity to a sequence selected from SEQ ID NOs: 3973-3997. In some embodiments, the at least one guide RNA has a crRNA sequence having at least 90% identity to a sequence selected from SEQ ID NOs: 3973-3997. In some embodiments, the at least one guide RNA has a crRNA sequence having at least 95% identity to a sequence selected from SEQ ID NOs: 3973-3997. In some embodiments, the at least one guide RNA has a crRNA sequence selected from SEQ ID NOs: 3973-3997. In some embodiments, the joint disease or condition is arthritis, e.g., osteoarthritis. In some embodiments, the administering includes intra-articular injection of the pharmaceutical composition into the joint of the subject.

[0580] In some embodiments, the present disclosure provides a pharmaceutical composition for the treatment or prevention of a joint disease or condition, the composition including a therapeutically effective amount of one or more nucleic acids encoding a Clustered Regularly Interspaced Short Palindromic Repeats (CRISPR) gene-editing system. The system includes a CRISPR Associated Protein 9 (Cas9) protein, and at least one guide RNA targeting an IRF3 gene, wherein the target sequence is adjacent to a protospacer adjacent motif (PAM) sequence for the Cas9 protein. In some embodiments, the at least one guide RNA includes a crRNA sequence that is complementary to a target sequence in any one of exons of the IRF3 gene. In some embodiments, the at least one guide RNA includes a crRNA sequence that is complementary to a target sequence in one of exons disclosed herein of the IRF3 gene. In some embodiments, the at least one guide RNA has a crRNA sequence having at least 75% identity to a sequence selected from SEQ ID NOs: 3998-4022. In some embodiments, the at least one guide RNA has a crRNA sequence having at least 80% identity to a sequence selected from SEQ ID NOs: 3998-4022. In some embodiments, the at least one guide RNA has a crRNA sequence having at least 85% identity to a sequence selected from SEQ ID NOs: 3998-4022. In some embodiments, the at least one guide RNA has a crRNA sequence having at least 90% identity to a sequence selected from SEQ ID NOs: 3998-4022. In some embodiments, the at least one guide RNA has a crRNA sequence having at least 95% identity to a sequence selected from SEQ ID NOs: 3998-4022. In some embodiments, the at least one guide RNA has a crRNA sequence selected from SEQ ID NOs: 3998-4022.

[0581] In some embodiments, the present disclosure provides method for the treatment or prevention of a joint disease or condition in a subject in need thereof. The method includes administering, to a joint of the subject, a pharmaceutical composition including a pharmaceutically effective amount of a composition having one or more nucleic acids encoding a Clustered Regularly Interspaced Short Palindromic Repeats (CRISPR) gene-editing system. The system includes a CRISPR Associated Protein 9 (Cas9) protein, and at least one guide RNA targeting an IRF3 gene, wherein the target sequence is adjacent to a protospacer adjacent motif (PAM) sequence for the Cas9 protein. In some embodiments, the at least one guide RNA includes a crRNA sequence that is complementary to a target sequence in any one of exons of the IRF3 gene. In some embodiments, the at least one guide RNA includes a crRNA sequence that is complementary to a target sequence in one of exons disclosed herein of the IRF3 gene. In some embodiments, the at least one guide RNA has a crRNA sequence having at least 75% identity to a sequence selected from SEQ ID NOs: 3998-4022. In some embodiments, the at least one guide RNA has a crRNA sequence having at least 80% identity to a sequence selected from SEQ ID NOs: 3998-4022. In some embodiments, the at least one guide RNA has a crRNA sequence having at least 85% identity to a sequence selected from SEQ ID NOs: 3998-4022. In some embodiments, the at least one guide RNA has a crRNA sequence having at least 90% identity to a sequence selected from SEQ ID NOs: 3998-4022. In some embodiments, the at least one guide RNA has a crRNA sequence having at least 95% identity to a sequence selected from SEQ ID NOs: 3998-4022. In some embodiments, the at least one guide RNA has a crRNA sequence selected from SEQ ID NOs: 3998-4022. In some embodiments, the joint disease or condition is arthritis, e.g., osteoarthritis. In some embodiments, the administering includes intra-articular injection of the pharmaceutical composition into the joint of the subject.

[0582] In some embodiments, the present disclosure provides a pharmaceutical composition for the treatment or prevention of a joint disease or condition, the composition including a therapeutically effective amount of one or more nucleic acids encoding a Clustered Regularly Interspaced Short Palindromic Repeats (CRISPR) gene-editing system. The system includes a CRISPR Associated Protein 9 (Cas9) protein, and at least one guide RNA targeting an IRF7 gene, wherein the target sequence is adjacent to a protospacer adjacent motif (PAM) sequence for the Cas9 protein. In some embodiments, the at least one guide RNA includes a crRNA sequence that is complementary to a target sequence in any one of exons of the IRF7 gene. In some embodiments, the at least one guide RNA includes a crRNA sequence that is complementary to a target sequence in one of exons disclosed herein of the IRF7 gene. In some embodiments, the at least one guide RNA has a crRNA sequence having at least 75% identity to a sequence selected from SEQ ID NOs: 4023-4047. In some embodiments, the at least one guide RNA has a crRNA sequence having at least 80% identity to a sequence selected from SEQ ID NOs: 4023-4047. In some embodiments, the at least one guide RNA has a crRNA sequence having at least 85% identity to a sequence selected from SEQ ID NOs: 4023-4047. In some embodiments, the at least one guide RNA has a crRNA sequence having at least 90% identity to a sequence selected from SEQ ID NOs: 4023-4047. In some embodiments, the at least one guide RNA has a crRNA sequence having at least 95% identity to a sequence selected from SEQ ID NOs: 4023-4047. In some embodiments, the at least one guide RNA has a crRNA sequence selected from SEQ ID NOs: 4023-4047.

[0583] In some embodiments, the present disclosure provides method for the treatment or prevention of a joint disease or condition in a subject in need thereof. The method includes administering, to a joint of the subject, a pharmaceutical composition including a pharmaceutically effective amount of a composition having one or more nucleic acids encoding a Clustered Regularly Interspaced Short Palindromic Repeats (CRISPR) gene-editing system. The system includes a CRISPR Associated Protein 9 (Cas9) protein, and at least one guide RNA targeting an IRF7 gene, wherein the target sequence is adjacent to a protospacer adjacent motif (PAM) sequence for the Cas9 protein. In some embodiments, the at least one guide RNA includes a crRNA sequence that is complementary to a target sequence in any one of exons of the IRF7 gene. In some embodiments, the at least one guide RNA includes a crRNA sequence that is complementary to a target sequence in one of exons disclosed herein of the IRF7 gene. In some embodiments, the at least one guide RNA has a crRNA sequence having at least 75% identity to a sequence selected from SEQ ID NOs: 4023-4047. In some embodiments, the at least one guide RNA has a crRNA sequence having at least 80% identity to a sequence selected from SEQ ID NOs: 4023-4047. In some embodiments, the at least one guide RNA has a crRNA sequence having at least 85% identity to a sequence selected from SEQ ID NOs: 4023-4047. In some embodiments, the at least one guide RNA has a crRNA sequence having at least 90% identity to a sequence selected from SEQ ID NOs: 4023-4047. In some embodiments, the at least one guide RNA has a crRNA sequence having at least 95% identity to a sequence selected from SEQ ID NOs: 4023-4047. In some embodiments, the at least one guide RNA has a crRNA sequence selected from SEQ ID NOs: 4023-4047. In some embodiments, the joint disease or condition is arthritis, e.g., osteoarthritis. In some embodiments, the administering includes intra-articular injection of the pharmaceutical composition into the joint of the subject.

[0584] In some embodiments, the present disclosure provides a pharmaceutical composition for the treatment or prevention of a joint disease or condition, the composition including a therapeutically effective amount of one or more nucleic acids encoding a Clustered Regularly Interspaced Short Palindromic Repeats (CRISPR) gene-editing system. The system includes a CRISPR Associated Protein 9 (Cas9) protein, and at least one guide RNA targeting an LAG3 gene, wherein the target sequence is adjacent to a protospacer adjacent motif (PAM) sequence for the Cas9 protein. In some embodiments, the at least one guide RNA includes a crRNA sequence that is complementary to a target sequence in any one of exons of the LAG3 gene. In some embodiments, the at least one guide RNA includes a crRNA sequence that is complementary to a target sequence in one of exons disclosed herein of the LAG3 gene. In some embodiments, the at least one guide RNA has a crRNA sequence having at least 75% identity to a sequence selected from SEQ ID NOs: 4048-4072. In some embodiments, the at least one guide RNA has a crRNA sequence having at least 80% identity to a sequence selected from SEQ ID NOs: 4048-4072. In some embodiments, the at least one guide RNA has a crRNA sequence having at least 85% identity to a sequence selected from SEQ ID NOs: 4048-4072. In some embodiments, the at least one guide RNA has a crRNA sequence having at least 90% identity to a sequence selected from SEQ ID NOs: 4048-4072. In some embodiments, the at least one guide RNA has a crRNA sequence having at least 95% identity to a sequence selected from SEQ ID NOs: 4048-4072. In some embodiments, the at least one guide RNA has a crRNA sequence selected from SEQ ID NOs: 4048-4072.

[0585] In some embodiments, the present disclosure provides method for the treatment or prevention of a joint disease or condition in a subject in need thereof. The method includes administering, to a joint of the subject, a pharmaceutical composition including a pharmaceutically effective amount of a composition having one or more nucleic acids encoding a Clustered Regularly Interspaced Short Palindromic Repeats (CRISPR) gene-editing system. The system includes a CRISPR Associated Protein 9 (Cas9) protein, and at least one guide RNA targeting an LAG3 gene, wherein the target sequence is adjacent to a protospacer adjacent motif (PAM) sequence for the Cas9 protein. In some embodiments, the at least one guide RNA includes a crRNA sequence that is complementary to a target sequence in any one of exons of the LAG3 gene. In some embodiments, the at least one guide RNA includes a crRNA sequence that is complementary to a target sequence in one of exons disclosed herein of the LAG3 gene. In some embodiments, the at least one guide RNA has a crRNA sequence having at least 75% identity to a sequence selected from SEQ ID NOs: 4048-4072. In some embodiments, the at least one guide RNA has a crRNA sequence having at least 80% identity to a sequence selected from SEQ ID NOs: 4048-4072. In some embodiments, the at least one guide RNA has a crRNA sequence having at least 85% identity to a sequence selected from SEQ ID NOs: 4048-4072. In some embodiments, the at least one guide RNA has a crRNA sequence having at least 90% identity to a sequence selected from SEQ ID NOs: 4048-4072. In some embodiments, the at least one guide RNA has a crRNA sequence having at least 95% identity to a sequence selected from SEQ ID NOs: 4048-4072. In some embodiments, the at least one guide RNA has a crRNA sequence selected from SEQ ID NOs: 4048-4072. In some embodiments, the joint disease or condition is arthritis, e.g., osteoarthritis. In some embodiments, the administering includes intra-articular injection of the pharmaceutical composition into the joint of the subject.

[0586] In some embodiments, the present disclosure provides a pharmaceutical composition for the treatment or prevention of a joint disease or condition, the composition including a therapeutically effective amount of one or more nucleic acids encoding a Clustered Regularly Interspaced Short Palindromic Repeats (CRISPR) gene-editing system. The system includes a CRISPR Associated Protein 9 (Cas9) protein, and at least one guide RNA targeting an LIPC gene, wherein the target sequence is adjacent to a protospacer adjacent motif (PAM) sequence for the Cas9 protein. In some embodiments, the at least one guide RNA includes a crRNA sequence that is complementary to a target sequence in any one of exons of the LIPC gene. In some embodiments, the at least one guide RNA includes a crRNA sequence that is complementary to a target sequence in one of exons disclosed herein of the LIPC gene. In some embodiments, the at least one guide RNA has a crRNA sequence having at least 75% identity to a sequence selected from SEQ ID NOs: 4073-4097. In some embodiments, the at least one guide RNA has a crRNA sequence having at least 80% identity to a sequence selected from SEQ ID NOs: 4073-4097. In some embodiments, the at least one guide RNA has a crRNA sequence having at least 85% identity to a sequence selected from SEQ ID NOs: 4073-4097. In some embodiments, the at least one guide RNA has a crRNA sequence having at least 90% identity to a sequence selected from SEQ ID NOs: 4073-4097. In some embodiments, the at least one guide RNA has a crRNA sequence having at least 95% identity to a sequence selected from SEQ ID NOs: 4073-4097. In some embodiments, the at least one guide RNA has a crRNA sequence selected from SEQ ID NOs: 4073-4097.

[0587] In some embodiments, the present disclosure provides method for the treatment or prevention of a joint disease or condition in a subject in need thereof. The method includes administering, to a joint of the subject, a pharmaceutical composition including a pharmaceutically effective amount of a composition having one or more nucleic acids encoding a Clustered Regularly Interspaced Short Palindromic Repeats (CRISPR) gene-editing system. The system includes a CRISPR Associated Protein 9 (Cas9) protein, and at least one guide RNA targeting an LIPC gene, wherein the target sequence is adjacent to a protospacer adjacent motif (PAM) sequence for the Cas9 protein. In some embodiments, the at least one guide RNA includes a crRNA sequence that is complementary to a target sequence in any one of exons of the LIPC gene. In some embodiments, the at least one guide RNA includes a crRNA sequence that is complementary to a target sequence in one of exons disclosed herein of the LIPC gene. In some embodiments, the at least one guide RNA has a crRNA sequence having at least 75% identity to a sequence selected from SEQ ID NOs: 4073-4097. In some embodiments, the at least one guide RNA has a crRNA sequence having at least 80% identity to a sequence selected from SEQ ID NOs: 4073-4097. In some embodiments, the at least one guide RNA has a crRNA sequence having at least 85% identity to a sequence selected from SEQ ID NOs: 4073-4097. In some embodiments, the at least one guide RNA has a crRNA sequence having at least 90% identity to a sequence selected from SEQ ID NOs: 4073-4097. In some embodiments, the at least one guide RNA has a crRNA sequence having at least 95% identity to a sequence selected from SEQ ID NOs: 4073-4097. In some embodiments, the at least one guide RNA has a crRNA sequence selected from SEQ ID NOs: 4073-4097. In some embodiments, the joint disease or condition is arthritis, e.g., osteoarthritis. In some embodiments, the administering includes intra-articular injection of the pharmaceutical composition into the joint of the subject.

[0588] In some embodiments, the present disclosure provides a pharmaceutical composition for the treatment or prevention of a joint disease or condition, the composition including a therapeutically effective amount of one or more nucleic acids encoding a Clustered Regularly Interspaced Short Palindromic Repeats (CRISPR) gene-editing system. The system includes a CRISPR Associated Protein 9 (Cas9) protein, and at least one guide RNA targeting an IFIH1 gene, wherein the target sequence is adjacent to a protospacer adjacent motif (PAM) sequence for the Cas9 protein. In some embodiments, the at least one guide RNA includes a crRNA sequence that is complementary to a target sequence in any one of exons of the IFIH1 gene. In some embodiments, the at least one guide RNA includes a crRNA sequence that is complementary to a target sequence in one of exons disclosed herein of the IFIH1 gene. In some embodiments, the at least one guide RNA has a crRNA sequence having at least 75% identity to a sequence selected from SEQ ID NOs: 4098-4122. In some embodiments, the at least one guide RNA has a crRNA sequence having at least 80% identity to a sequence selected from SEQ ID NOs: 4098-4122. In some embodiments, the at least one guide RNA has a crRNA sequence having at least 85% identity to a sequence selected from SEQ ID NOs: 4098-4122. In some embodiments, the at least one guide RNA has a crRNA sequence having at least 90% identity to a sequence selected from SEQ ID NOs: 4098-4122. In some embodiments, the at least one guide RNA has a crRNA sequence having at least 95% identity to a sequence selected from SEQ ID NOs: 4098-4122. In some embodiments, the at least one guide RNA has a crRNA sequence selected from SEQ ID NOs: 4098-4122.

[0589] In some embodiments, the present disclosure provides method for the treatment or prevention of a joint disease or condition in a subject in need thereof. The method includes administering, to a joint of the subject, a pharmaceutical composition including a pharmaceutically effective amount of a composition having one or more nucleic acids encoding a Clustered Regularly Interspaced Short Palindromic Repeats (CRISPR) gene-editing system. The system includes a CRISPR Associated Protein 9 (Cas9) protein, and at least one guide RNA targeting an IFIH1 gene, wherein the target sequence is adjacent to a protospacer adjacent motif (PAM) sequence for the Cas9 protein. In some embodiments, the at least one guide RNA includes a crRNA sequence that is complementary to a target sequence in any one of exons of the IFIH1 gene. In some embodiments, the at least one guide RNA includes a crRNA sequence that is complementary to a target sequence in one of exons disclosed herein of the IFIH1 gene. In some embodiments, the at least one guide RNA has a crRNA sequence having at least 75% identity to a sequence selected from SEQ ID NOs: 4098-4122. In some embodiments, the at least one guide RNA has a crRNA sequence having at least 80% identity to a sequence selected from SEQ ID NOs: 4098-4122. In some embodiments, the at least one guide RNA has a crRNA sequence having at least 85% identity to a sequence selected from SEQ ID NOs: 4098-4122. In some embodiments, the at least one guide RNA has a crRNA sequence having at least 90% identity to a sequence selected from SEQ ID NOs: 4098-4122. In some embodiments, the at least one guide RNA has a crRNA sequence having at least 95% identity to a sequence selected from SEQ ID NOs: 4098-4122. In some embodiments, the at least one guide RNA has a crRNA sequence selected from SEQ ID NOs: 4098-4122. In some embodiments, the joint disease or condition is arthritis, e.g., osteoarthritis. In some embodiments, the administering includes intra-articular injection of the pharmaceutical composition into the joint of the subject.

[0590] In some embodiments, the present disclosure provides a pharmaceutical composition for the treatment or prevention of a joint disease or condition, the composition including a therapeutically effective amount of one or more nucleic acids encoding a Clustered Regularly Interspaced Short Palindromic Repeats (CRISPR) gene-editing system. The system includes a CRISPR Associated Protein 9 (Cas9) protein, and at least one guide RNA targeting an MYH9 gene, wherein the target sequence is adjacent to a protospacer adjacent motif (PAM) sequence for the Cas9 protein. In some embodiments, the at least one guide RNA includes a crRNA sequence that is complementary to a target sequence in any one of exons of the MYH9 gene. In some embodiments, the at least one guide RNA includes a crRNA sequence that is complementary to a target sequence in one of exons disclosed herein of the MYH9 gene. In some embodiments, the at least one guide RNA has a crRNA sequence having at least 75% identity to a sequence selected from SEQ ID NOs: 4123-4147. In some embodiments, the at least one guide RNA has a crRNA sequence having at least 80% identity to a sequence selected from SEQ ID NOs: 4123-4147. In some embodiments, the at least one guide RNA has a crRNA sequence having at least 85% identity to a sequence selected from SEQ ID NOs: 4123-4147. In some embodiments, the at least one guide RNA has a crRNA sequence having at least 90% identity to a sequence selected from SEQ ID NOs: 4123-4147. In some embodiments, the at least one guide RNA has a crRNA sequence having at least 95% identity to a sequence selected from SEQ ID NOs: 4123-4147. In some embodiments, the at least one guide RNA has a crRNA sequence selected from SEQ ID NOs: 4123-4147.

[0591] In some embodiments, the present disclosure provides method for the treatment or prevention of a joint disease or condition in a subject in need thereof. The method includes administering, to a joint of the subject, a pharmaceutical composition including a pharmaceutically effective amount of a composition having one or more nucleic acids encoding a Clustered Regularly Interspaced Short Palindromic Repeats (CRISPR) gene-editing system. The system includes a CRISPR Associated Protein 9 (Cas9) protein, and at least one guide RNA targeting an MYH9 gene, wherein the target sequence is adjacent to a protospacer adjacent motif (PAM) sequence for the Cas9 protein. In some embodiments, the at least one guide RNA includes a crRNA sequence that is complementary to a target sequence in any one of exons of the MYH9 gene. In some embodiments, the at least one guide RNA includes a crRNA sequence that is complementary to a target sequence in one of exons disclosed herein of the MYH9 gene. In some embodiments, the at least one guide RNA has a crRNA sequence having at least 75% identity to a sequence selected from SEQ ID NOs: 4123-4147. In some embodiments, the at least one guide RNA has a crRNA sequence having at least 80% identity to a sequence selected from SEQ ID NOs: 4123-4147. In some embodiments, the at least one guide RNA has a crRNA sequence having at least 85% identity to a sequence selected from SEQ ID NOs: 4123-4147. In some embodiments, the at least one guide RNA has a crRNA sequence having at least 90% identity to a sequence selected from SEQ ID NOs: 4123-4147. In some embodiments, the at least one guide RNA has a crRNA sequence having at least 95% identity to a sequence selected from SEQ ID NOs: 4123-4147. In some embodiments, the at least one guide RNA has a crRNA sequence selected from SEQ ID NOs: 4123-4147. In some embodiments, the joint disease or condition is arthritis, e.g., osteoarthritis. In some embodiments, the administering includes intra-articular injection of the pharmaceutical composition into the joint of the subject.

[0592] In some embodiments, the present disclosure provides a pharmaceutical composition for the treatment or prevention of a joint disease or condition, the composition including a therapeutically effective amount of one or more nucleic acids encoding a Clustered Regularly Interspaced Short Palindromic Repeats (CRISPR) gene-editing system. The system includes a CRISPR Associated Protein 9 (Cas9) protein, and at least one guide RNA targeting an MYO16 gene, wherein the target sequence is adjacent to a protospacer adjacent motif (PAM) sequence for the Cas9 protein. In some embodiments, the at least one guide RNA includes a crRNA sequence that is complementary to a target sequence in any one of exons of the MYO16 gene. In some embodiments, the at least one guide RNA includes a crRNA sequence that is complementary to a target sequence in one of exons disclosed herein of the MYO16 gene. In some embodiments, the at least one guide RNA has a crRNA sequence having at least 75% identity to a sequence selected from SEQ ID NOs: 4148-4172. In some embodiments, the at least one guide RNA has a crRNA sequence having at least 80% identity to a sequence selected from SEQ ID NOs: 4148-4172. In some embodiments, the at least one guide RNA has a crRNA sequence having at least 85% identity to a sequence selected from SEQ ID NOs: 4148-4172. In some embodiments, the at least one guide RNA has a crRNA sequence having at least 90% identity to a sequence selected from SEQ ID NOs: 4148-4172. In some embodiments, the at least one guide RNA has a crRNA sequence having at least 95% identity to a sequence selected from SEQ ID NOs: 4148-4172. In some embodiments, the at least one guide RNA has a crRNA sequence selected from SEQ ID NOs: 4148-4172.

[0593] In some embodiments, the present disclosure provides method for the treatment or prevention of a joint disease or condition in a subject in need thereof. The method includes administering, to a joint of the subject, a pharmaceutical composition including a pharmaceutically effective amount of a composition having one or more nucleic acids encoding a Clustered Regularly Interspaced Short Palindromic Repeats (CRISPR) gene-editing system. The system includes a CRISPR Associated Protein 9 (Cas9) protein, and at least one guide RNA targeting an MYO16 gene, wherein the target sequence is adjacent to a protospacer adjacent motif (PAM) sequence for the Cas9 protein. In some embodiments, the at least one guide RNA includes a crRNA sequence that is complementary to a target sequence in any one of exons of the MYO16 gene. In some embodiments, the at least one guide RNA includes a crRNA sequence that is complementary to a target sequence in one of exons disclosed herein of the MYO16 gene. In some embodiments, the at least one guide RNA has a crRNA sequence having at least 75% identity to a sequence selected from SEQ ID NOs: 4148-4172. In some embodiments, the at least one guide RNA has a crRNA sequence having at least 80% identity to a sequence selected from SEQ ID NOs: 4148-4172. In some embodiments, the at least one guide RNA has a crRNA sequence having at least 85% identity to a sequence selected from SEQ ID NOs: 4148-4172. In some embodiments, the at least one guide RNA has a crRNA sequence having at least 90% identity to a sequence selected from SEQ ID NOs: 4148-4172. In some embodiments, the at least one guide RNA has a crRNA sequence having at least 95% identity to a sequence selected from SEQ ID NOs: 4148-4172. In some embodiments, the at least one guide RNA has a crRNA sequence selected from SEQ ID NOs: 4148-4172. In some embodiments, the joint disease or condition is arthritis, e.g., osteoarthritis. In some embodiments, the administering includes intra-articular injection of the pharmaceutical composition into the joint of the subject.

[0594] In some embodiments, the present disclosure provides a pharmaceutical composition for the treatment or prevention of a joint disease or condition, the composition including a therapeutically effective amount of one or more nucleic acids encoding a Clustered Regularly Interspaced Short Palindromic Repeats (CRISPR) gene-editing system. The system includes a CRISPR Associated Protein 9 (Cas9) protein, and at least one guide RNA targeting an MYO5A gene, wherein the target sequence is adjacent to a protospacer adjacent motif (PAM) sequence for the Cas9 protein. In some embodiments, the at least one guide RNA includes a crRNA sequence that is complementary to a target sequence in any one of exons of the MYO5A gene. In some embodiments, the at least one guide RNA includes a crRNA sequence that is complementary to a target sequence in one of exons disclosed herein of the MYO5A gene. In some embodiments, the at least one guide RNA has a crRNA sequence having at least 75% identity to a sequence selected from SEQ ID NOs: 4173-4197. In some embodiments, the at least one guide RNA has a crRNA sequence having at least 80% identity to a sequence selected from SEQ ID NOs: 4173-4197. In some embodiments, the at least one guide RNA has a crRNA sequence having at least 85% identity to a sequence selected from SEQ ID NOs: 4173-4197. In some embodiments, the at least one guide RNA has a crRNA sequence having at least 90% identity to a sequence selected from SEQ ID NOs: 4173-4197. In some embodiments, the at least one guide RNA has a crRNA sequence having at least 95% identity to a sequence selected from SEQ ID NOs: 4173-4197. In some embodiments, the at least one guide RNA has a crRNA sequence selected from SEQ ID NOs: 4173-4197.

[0595] In some embodiments, the present disclosure provides method for the treatment or prevention of a joint disease or condition in a subject in need thereof. The method includes administering, to a joint of the subject, a pharmaceutical composition including a pharmaceutically effective amount of a composition having one or more nucleic acids encoding a Clustered Regularly Interspaced Short Palindromic Repeats (CRISPR) gene-editing system. The system includes a CRISPR Associated Protein 9 (Cas9) protein, and at least one guide RNA targeting an MYO5A gene, wherein the target sequence is adjacent to a protospacer adjacent motif (PAM) sequence for the Cas9 protein. In some embodiments, the at least one guide RNA includes a crRNA sequence that is complementary to a target sequence in any one of exons of the MYO5A gene. In some embodiments, the at least one guide RNA includes a crRNA sequence that is complementary to a target sequence in one of exons disclosed herein of the MYO5A gene. In some embodiments, the at least one guide RNA has a crRNA sequence having at least 75% identity to a sequence selected from SEQ ID NOs: 4173-4197. In some embodiments, the at least one guide RNA has a crRNA sequence having at least 80% identity to a sequence selected from SEQ ID NOs: 4173-4197. In some embodiments, the at least one guide RNA has a crRNA sequence having at least 85% identity to a sequence selected from SEQ ID NOs: 4173-4197. In some embodiments, the at least one guide RNA has a crRNA sequence having at least 90% identity to a sequence selected from SEQ ID NOs: 4173-4197. In some embodiments, the at least one guide RNA has a crRNA sequence having at least 95% identity to a sequence selected from SEQ ID NOs: 4173-4197. In some embodiments, the at least one guide RNA has a crRNA sequence selected from SEQ ID NOs: 4173-4197. In some embodiments, the joint disease or condition is arthritis, e.g., osteoarthritis. In some embodiments, the administering includes intra-articular injection of the pharmaceutical composition into the joint of the subject.

[0596] In some embodiments, the present disclosure provides a pharmaceutical composition for the treatment or prevention of a joint disease or condition, the composition including a therapeutically effective amount of one or more nucleic acids encoding a Clustered Regularly Interspaced Short Palindromic Repeats (CRISPR) gene-editing system. The system includes a CRISPR Associated Protein 9 (Cas9) protein, and at least one guide RNA targeting an NAIP gene, wherein the target sequence is adjacent to a protospacer adjacent motif (PAM) sequence for the Cas9 protein. In some embodiments, the at least one guide RNA includes a crRNA sequence that is complementary to a target sequence in any one of exons of the NAIP gene. In some embodiments, the at least one guide RNA includes a crRNA sequence that is complementary to a target sequence in one of exons disclosed herein of the NAIP gene. In some embodiments, the at least one guide RNA has a crRNA sequence having at least 75% identity to a sequence selected from SEQ ID NOs: 4198-4222. In some embodiments, the at least one guide RNA has a crRNA sequence having at least 80% identity to a sequence selected from SEQ ID NOs: 4198-4222. In some embodiments, the at least one guide RNA has a crRNA sequence having at least 85% identity to a sequence selected from SEQ ID NOs: 4198-4222. In some embodiments, the at least one guide RNA has a crRNA sequence having at least 90% identity to a sequence selected from SEQ ID NOs: 4198-4222. In some embodiments, the at least one guide RNA has a crRNA sequence having at least 95% identity to a sequence selected from SEQ ID NOs: 4198-4222. In some embodiments, the at least one guide RNA has a crRNA sequence selected from SEQ ID NOs: 4198-4222.

[0597] In some embodiments, the present disclosure provides method for the treatment or prevention of a joint disease or condition in a subject in need thereof. The method includes administering, to a joint of the subject, a pharmaceutical composition including a pharmaceutically effective amount of a composition having one or more nucleic acids encoding a Clustered Regularly Interspaced Short Palindromic Repeats (CRISPR) gene-editing system. The system includes a CRISPR Associated Protein 9 (Cas9) protein, and at least one guide RNA targeting an NAIP gene, wherein the target sequence is adjacent to a protospacer adjacent motif (PAM) sequence for the Cas9 protein. In some embodiments, the at least one guide RNA includes a crRNA sequence that is complementary to a target sequence in any one of exons of the NAIP gene. In some embodiments, the at least one guide RNA includes a crRNA sequence that is complementary to a target sequence in one of exons disclosed herein of the NAIP gene. In some embodiments, the at least one guide RNA has a crRNA sequence having at least 75% identity to a sequence selected from SEQ ID NOs: 4198-4222. In some embodiments, the at least one guide RNA has a crRNA sequence having at least 80% identity to a sequence selected from SEQ ID NOs: 4198-4222. In some embodiments, the at least one guide RNA has a crRNA sequence having at least 85% identity to a sequence selected from SEQ ID NOs: 4198-4222. In some embodiments, the at least one guide RNA has a crRNA sequence having at least 90% identity to a sequence selected from SEQ ID NOs: 4198-4222. In some embodiments, the at least one guide RNA has a crRNA sequence having at least 95% identity to a sequence selected from SEQ ID NOs: 4198-4222. In some embodiments, the at least one guide RNA has a crRNA sequence selected from SEQ ID NOs: 4198-4222. In some embodiments, the joint disease or condition is arthritis, e.g., osteoarthritis. In some embodiments, the administering includes intra-articular injection of the pharmaceutical composition into the joint of the subject.

[0598] In some embodiments, the present disclosure provides a pharmaceutical composition for the treatment or prevention of a joint disease or condition, the composition including a therapeutically effective amount of one or more nucleic acids encoding a Clustered Regularly Interspaced Short Palindromic Repeats (CRISPR) gene-editing system. The system includes a CRISPR Associated Protein 9 (Cas9) protein, and at least one guide RNA targeting an NLRC4 gene, wherein the target sequence is adjacent to a protospacer adjacent motif (PAM) sequence for the Cas9 protein. In some embodiments, the at least one guide RNA includes a crRNA sequence that is complementary to a target sequence in any one of exons of the NLRC4 gene. In some embodiments, the at least one guide RNA includes a crRNA sequence that is complementary to a target sequence in one of exons disclosed herein of the NLRC4 gene. In some embodiments, the at least one guide RNA has a crRNA sequence having at least 75% identity to a sequence selected from SEQ ID NOs: 4223-4247. In some embodiments, the at least one guide RNA has a crRNA sequence having at least 80% identity to a sequence selected from SEQ ID NOs: 4223-4247. In some embodiments, the at least one guide RNA has a crRNA sequence having at least 85% identity to a sequence selected from SEQ ID NOs: 4223-4247. In some embodiments, the at least one guide RNA has a crRNA sequence having at least 90% identity to a sequence selected from SEQ ID NOs: 4223-4247. In some embodiments, the at least one guide RNA has a crRNA sequence having at least 95% identity to a sequence selected from SEQ ID NOs: 4223-4247. In some embodiments, the at least one guide RNA has a crRNA sequence selected from SEQ ID NOs: 4223-4247.

[0599] In some embodiments, the present disclosure provides method for the treatment or prevention of a joint disease or condition in a subject in need thereof. The method includes administering, to a joint of the subject, a pharmaceutical composition including a pharmaceutically effective amount of a composition having one or more nucleic acids encoding a Clustered Regularly Interspaced Short Palindromic Repeats (CRISPR) gene-editing system. The system includes a CRISPR Associated Protein 9 (Cas9) protein, and at least one guide RNA targeting an NLRC4 gene, wherein the target sequence is adjacent to a protospacer adjacent motif (PAM) sequence for the Cas9 protein. In some embodiments, the at least one guide RNA includes a crRNA sequence that is complementary to a target sequence in any one of exons of the NLRC4 gene. In some embodiments, the at least one guide RNA includes a crRNA sequence that is complementary to a target sequence in one of exons disclosed herein of the NLRC4 gene. In some embodiments, the at least one guide RNA has a crRNA sequence having at least 75% identity to a sequence selected from SEQ ID NOs: 4223-4247. In some embodiments, the at least one guide RNA has a crRNA sequence having at least 80% identity to a sequence selected from SEQ ID NOs: 4223-4247. In some embodiments, the at least one guide RNA has a crRNA sequence having at least 85% identity to a sequence selected from SEQ ID NOs: 4223-4247. In some embodiments, the at least one guide RNA has a crRNA sequence having at least 90% identity to a sequence selected from SEQ ID NOs: 4223-4247. In some embodiments, the at least one guide RNA has a crRNA sequence having at least 95% identity to a sequence selected from SEQ ID NOs: 4223-4247. In some embodiments, the at least one guide RNA has a crRNA sequence selected from SEQ ID NOs: 4223-4247. In some embodiments, the joint disease or condition is arthritis, e.g., osteoarthritis. In some embodiments, the administering includes intra-articular injection of the pharmaceutical composition into the joint of the subject.

[0600] In some embodiments, the present disclosure provides a pharmaceutical composition for the treatment or prevention of a joint disease or condition, the composition including a therapeutically effective amount of one or more nucleic acids encoding a Clustered Regularly Interspaced Short Palindromic Repeats (CRISPR) gene-editing system. The system includes a CRISPR Associated Protein 9 (Cas9) protein, and at least one guide RNA targeting an NLRP3 gene, wherein the target sequence is adjacent to a protospacer adjacent motif (PAM) sequence for the Cas9 protein. In some embodiments, the at least one guide RNA includes a crRNA sequence that is complementary to a target sequence in any one of exons of the NLRP3 gene. In some embodiments, the at least one guide RNA includes a crRNA sequence that is complementary to a target sequence in one of exons disclosed herein of the NLRP3 gene. In some embodiments, the at least one guide RNA has a crRNA sequence having at least 75% identity to a sequence selected from SEQ ID NOs: 4248-4272. In some embodiments, the at least one guide RNA has a crRNA sequence having at least 80% identity to a sequence selected from SEQ ID NOs: 4248-4272. In some embodiments, the at least one guide RNA has a crRNA sequence having at least 85% identity to a sequence selected from SEQ ID NOs: 4248-4272. In some embodiments, the at least one guide RNA has a crRNA sequence having at least 90% identity to a sequence selected from SEQ ID NOs: 4248-4272. In some embodiments, the at least one guide RNA has a crRNA sequence having at least 95% identity to a sequence selected from SEQ ID NOs: 4248-4272. In some embodiments, the at least one guide RNA has a crRNA sequence selected from SEQ ID NOs: 4248-4272.

[0601] In some embodiments, the present disclosure provides method for the treatment or prevention of a joint disease or condition in a subject in need thereof. The method includes administering, to a joint of the subject, a pharmaceutical composition including a pharmaceutically effective amount of a composition having one or more nucleic acids encoding a Clustered Regularly Interspaced Short Palindromic Repeats (CRISPR) gene-editing system. The system includes a CRISPR Associated Protein 9 (Cas9) protein, and at least one guide RNA targeting an NLRP3 gene, wherein the target sequence is adjacent to a protospacer adjacent motif (PAM) sequence for the Cas9 protein. In some embodiments, the at least one guide RNA includes a crRNA sequence that is complementary to a target sequence in any one of exons of the NLRP3 gene. In some embodiments, the at least one guide RNA includes a crRNA sequence that is complementary to a target sequence in one of exons disclosed herein of the NLRP3 gene. In some embodiments, the at least one guide RNA has a crRNA sequence having at least 75% identity to a sequence selected from SEQ ID NOs: 4248-4272. In some embodiments, the at least one guide RNA has a crRNA sequence having at least 80% identity to a sequence selected from SEQ ID NOs: 4248-4272. In some embodiments, the at least one guide RNA has a crRNA sequence having at least 85% identity to a sequence selected from SEQ ID NOs: 4248-4272. In some embodiments, the at least one guide RNA has a crRNA sequence having at least 90% identity to a sequence selected from SEQ ID NOs: 4248-4272. In some embodiments, the at least one guide RNA has a crRNA sequence having at least 95% identity to a sequence selected from SEQ ID NOs: 4248-4272. In some embodiments, the at least one guide RNA has a crRNA sequence selected from SEQ ID NOs: 4248-4272. In some embodiments, the joint disease or condition is arthritis, e.g., osteoarthritis. In some embodiments, the administering includes intra-articular injection of the pharmaceutical composition into the joint of the subject.

[0602] In some embodiments, the present disclosure provides a pharmaceutical composition for the treatment or prevention of a joint disease or condition, the composition including a therapeutically effective amount of one or more nucleic acids encoding a Clustered Regularly Interspaced Short Palindromic Repeats (CRISPR) gene-editing system. The system includes a CRISPR Associated Protein 9 (Cas9) protein, and at least one guide RNA targeting an NOD2 gene, wherein the target sequence is adjacent to a protospacer adjacent motif (PAM) sequence for the Cas9 protein. In some embodiments, the at least one guide RNA includes a crRNA sequence that is complementary to a target sequence in any one of exons of the NOD2 gene. In some embodiments, the at least one guide RNA includes a crRNA sequence that is complementary to a target sequence in one of exons disclosed herein of the NOD2 gene. In some embodiments, the at least one guide RNA has a crRNA sequence having at least 75% identity to a sequence selected from SEQ ID NOs: 4273-4297. In some embodiments, the at least one guide RNA has a crRNA sequence having at least 80% identity to a sequence selected from SEQ ID NOs: 4273-4297. In some embodiments, the at least one guide RNA has a crRNA sequence having at least 85% identity to a sequence selected from SEQ ID NOs: 4273-4297. In some embodiments, the at least one guide RNA has a crRNA sequence having at least 90% identity to a sequence selected from SEQ ID NOs: 4273-4297. In some embodiments, the at least one guide RNA has a crRNA sequence having at least 95% identity to a sequence selected from SEQ ID NOs: 4273-4297. In some embodiments, the at least one guide RNA has a crRNA sequence selected from SEQ ID NOs: 4273-4297.

[0603] In some embodiments, the present disclosure provides method for the treatment or prevention of a joint disease or condition in a subject in need thereof. The method includes administering, to a joint of the subject, a pharmaceutical composition including a pharmaceutically effective amount of a composition having one or more nucleic acids encoding a Clustered Regularly Interspaced Short Palindromic Repeats (CRISPR) gene-editing system. The system includes a CRISPR Associated Protein 9 (Cas9) protein, and at least one guide RNA targeting an NOD2 gene, wherein the target sequence is adjacent to a protospacer adjacent motif (PAM) sequence for the Cas9 protein. In some embodiments, the at least one guide RNA includes a crRNA sequence that is complementary to a target sequence in any one of exons of the NOD2 gene. In some embodiments, the at least one guide RNA includes a crRNA sequence that is complementary to a target sequence in one of exons disclosed herein of the NOD2 gene. In some embodiments, the at least one guide RNA has a crRNA sequence having at least 75% identity to a sequence selected from SEQ ID NOs: 4273-4297. In some embodiments, the at least one guide RNA has a crRNA sequence having at least 80% identity to a sequence selected from SEQ ID NOs: 4273-4297. In some embodiments, the at least one guide RNA has a crRNA sequence having at least 85% identity to a sequence selected from SEQ ID NOs: 4273-4297. In some embodiments, the at least one guide RNA has a crRNA sequence having at least 90% identity to a sequence selected from SEQ ID NOs: 4273-4297. In some embodiments, the at least one guide RNA has a crRNA sequence having at least 95% identity to a sequence selected from SEQ ID NOs: 4273-4297. In some embodiments, the at least one guide RNA has a crRNA sequence selected from SEQ ID NOs: 4273-4297. In some embodiments, the joint disease or condition is arthritis, e.g., osteoarthritis. In some embodiments, the administering includes intra-articular injection of the pharmaceutical composition into the joint of the subject.

[0604] In some embodiments, the present disclosure provides a pharmaceutical composition for the treatment or prevention of a joint disease or condition, the composition including a therapeutically effective amount of one or more nucleic acids encoding a Clustered Regularly Interspaced Short Palindromic Repeats (CRISPR) gene-editing system. The system includes a CRISPR Associated Protein 9 (Cas9) protein, and at least one guide RNA targeting an NPL gene, wherein the target sequence is adjacent to a protospacer adjacent motif (PAM) sequence for the Cas9 protein. In some embodiments, the at least one guide RNA includes a crRNA sequence that is complementary to a target sequence in any one of exons of the NPL gene. In some embodiments, the at least one guide RNA includes a crRNA sequence that is complementary to a target sequence in one of exons disclosed herein of the NPL gene. In some embodiments, the at least one guide RNA has a crRNA sequence having at least 75% identity to a sequence selected from SEQ ID NOs: 4298-4322. In some embodiments, the at least one guide RNA has a crRNA sequence having at least 80% identity to a sequence selected from SEQ ID NOs: 4298-4322. In some embodiments, the at least one guide RNA has a crRNA sequence having at least 85% identity to a sequence selected from SEQ ID NOs: 4298-4322. In some embodiments, the at least one guide RNA has a crRNA sequence having at least 90% identity to a sequence selected from SEQ ID NOs: 4298-4322. In some embodiments, the at least one guide RNA has a crRNA sequence having at least 95% identity to a sequence selected from SEQ ID NOs: 4298-4322. In some embodiments, the at least one guide RNA has a crRNA sequence selected from SEQ ID NOs: 4298-4322.

[0605] In some embodiments, the present disclosure provides method for the treatment or prevention of a joint disease or condition in a subject in need thereof. The method includes administering, to a joint of the subject, a pharmaceutical composition including a pharmaceutically effective amount of a composition having one or more nucleic acids encoding a Clustered Regularly Interspaced Short Palindromic Repeats (CRISPR) gene-editing system. The system includes a CRISPR Associated Protein 9 (Cas9) protein, and at least one guide RNA targeting an NPL gene, wherein the target sequence is adjacent to a protospacer adjacent motif (PAM) sequence for the Cas9 protein. In some embodiments, the at least one guide RNA includes a crRNA sequence that is complementary to a target sequence in any one of exons of the NPL gene. In some embodiments, the at least one guide RNA includes a crRNA sequence that is complementary to a target sequence in one of exons disclosed herein of the NPL gene. In some embodiments, the at least one guide RNA has a crRNA sequence having at least 75% identity to a sequence selected from SEQ ID NOs: 4298-4322. In some embodiments, the at least one guide RNA has a crRNA sequence having at least 80% identity to a sequence selected from SEQ ID NOs: 4298-4322. In some embodiments, the at least one guide RNA has a crRNA sequence having at least 85% identity to a sequence selected from SEQ ID NOs: 4298-4322. In some embodiments, the at least one guide RNA has a crRNA sequence having at least 90% identity to a sequence selected from SEQ ID NOs: 4298-4322. In some embodiments, the at least one guide RNA has a crRNA sequence having at least 95% identity to a sequence selected from SEQ ID NOs: 4298-4322. In some embodiments, the at least one guide RNA has a crRNA sequence selected from SEQ ID NOs: 4298-4322. In some embodiments, the joint disease or condition is arthritis, e.g., osteoarthritis. In some embodiments, the administering includes intra-articular injection of the pharmaceutical composition into the joint of the subject.

[0606] In some embodiments, the present disclosure provides a pharmaceutical composition for the treatment or prevention of a joint disease or condition, the composition including a therapeutically effective amount of one or more nucleic acids encoding a Clustered Regularly Interspaced Short Palindromic Repeats (CRISPR) gene-editing system. The system includes a CRISPR Associated Protein 9 (Cas9) protein, and at least one guide RNA targeting an NRROS gene, wherein the target sequence is adjacent to a protospacer adjacent motif (PAM) sequence for the Cas9 protein. In some embodiments, the at least one guide RNA includes a crRNA sequence that is complementary to a target sequence in any one of exons of the NRROS gene. In some embodiments, the at least one guide RNA includes a crRNA sequence that is complementary to a target sequence in one of exons disclosed herein of the NRROS gene. In some embodiments, the at least one guide RNA has a crRNA sequence having at least 75% identity to a sequence selected from SEQ ID NOs: 4323-4347. In some embodiments, the at least one guide RNA has a crRNA sequence having at least 80% identity to a sequence selected from SEQ ID NOs: 4323-4347. In some embodiments, the at least one guide RNA has a crRNA sequence having at least 85% identity to a sequence selected from SEQ ID NOs: 4323-4347. In some embodiments, the at least one guide RNA has a crRNA sequence having at least 90% identity to a sequence selected from SEQ ID NOs: 4323-4347. In some embodiments, the at least one guide RNA has a crRNA sequence having at least 95% identity to a sequence selected from SEQ ID NOs: 4323-4347. In some embodiments, the at least one guide RNA has a crRNA sequence selected from SEQ ID NOs: 4323-4347.

[0607] In some embodiments, the present disclosure provides method for the treatment or prevention of a joint disease or condition in a subject in need thereof. The method includes administering, to a joint of the subject, a pharmaceutical composition including a pharmaceutically effective amount of a composition having one or more nucleic acids encoding a Clustered Regularly Interspaced Short Palindromic Repeats (CRISPR) gene-editing system. The system includes a CRISPR Associated Protein 9 (Cas9) protein, and at least one guide RNA targeting an NRROS gene, wherein the target sequence is adjacent to a protospacer adjacent motif (PAM) sequence for the Cas9 protein. In some embodiments, the at least one guide RNA includes a crRNA sequence that is complementary to a target sequence in any one of exons of the NRROS gene. In some embodiments, the at least one guide RNA includes a crRNA sequence that is complementary to a target sequence in one of exons disclosed herein of the NRROS gene. In some embodiments, the at least one guide RNA has a crRNA sequence having at least 75% identity to a sequence selected from SEQ ID NOs: 4323-4347. In some embodiments, the at least one guide RNA has a crRNA sequence having at least 80% identity to a sequence selected from SEQ ID NOs: 4323-4347. In some embodiments, the at least one guide RNA has a crRNA sequence having at least 85% identity to a sequence selected from SEQ ID NOs: 4323-4347. In some embodiments, the at least one guide RNA has a crRNA sequence having at least 90% identity to a sequence selected from SEQ ID NOs: 4323-4347. In some embodiments, the at least one guide RNA has a crRNA sequence having at least 95% identity to a sequence selected from SEQ ID NOs: 4323-4347. In some embodiments, the at least one guide RNA has a crRNA sequence selected from SEQ ID NOs: 4323-4347. In some embodiments, the joint disease or condition is arthritis, e.g., osteoarthritis. In some embodiments, the administering includes intra-articular injection of the pharmaceutical composition into the joint of the subject.

[0608] In some embodiments, the present disclosure provides a pharmaceutical composition for the treatment or prevention of a joint disease or condition, the composition including a therapeutically effective amount of one or more nucleic acids encoding a Clustered Regularly Interspaced Short Palindromic Repeats (CRISPR) gene-editing system. The system includes a CRISPR Associated Protein 9 (Cas9) protein, and at least one guide RNA targeting an NLRX1 gene, wherein the target sequence is adjacent to a protospacer adjacent motif (PAM) sequence for the Cas9 protein. In some embodiments, the at least one guide RNA includes a crRNA sequence that is complementary to a target sequence in any one of exons of the NLRX1 gene. In some embodiments, the at least one guide RNA includes a crRNA sequence that is complementary to a target sequence in one of exons disclosed herein of the NLRX1 gene. In some embodiments, the at least one guide RNA has a crRNA sequence having at least 75% identity to a sequence selected from SEQ ID NOs: 4348-4372. In some embodiments, the at least one guide RNA has a crRNA sequence having at least 80% identity to a sequence selected from SEQ ID NOs: 4348-4372. In some embodiments, the at least one guide RNA has a crRNA sequence having at least 85% identity to a sequence selected from SEQ ID NOs: 4348-4372. In some embodiments, the at least one guide RNA has a crRNA sequence having at least 90% identity to a sequence selected from SEQ ID NOs: 4348-4372. In some embodiments, the at least one guide RNA has a crRNA sequence having at least 95% identity to a sequence selected from SEQ ID NOs: 4348-4372. In some embodiments, the at least one guide RNA has a crRNA sequence selected from SEQ ID NOs: 4348-4372.

[0609] In some embodiments, the present disclosure provides method for the treatment or prevention of a joint disease or condition in a subject in need thereof. The method includes administering, to a joint of the subject, a pharmaceutical composition including a pharmaceutically effective amount of a composition having one or more nucleic acids encoding a Clustered Regularly Interspaced Short Palindromic Repeats (CRISPR) gene-editing system. The system includes a CRISPR Associated Protein 9 (Cas9) protein, and at least one guide RNA targeting an NLRX1 gene, wherein the target sequence is adjacent to a protospacer adjacent motif (PAM) sequence for the Cas9 protein. In some embodiments, the at least one guide RNA includes a crRNA sequence that is complementary to a target sequence in any one of exons of the NLRX1 gene. In some embodiments, the at least one guide RNA includes a crRNA sequence that is complementary to a target sequence in one of exons disclosed herein of the NLRX1 gene. In some embodiments, the at least one guide RNA has a crRNA sequence having at least 75% identity to a sequence selected from SEQ ID NOs: 4348-4372. In some embodiments, the at least one guide RNA has a crRNA sequence having at least 80% identity to a sequence selected from SEQ ID NOs: 4348-4372. In some embodiments, the at least one guide RNA has a crRNA sequence having at least 85% identity to a sequence selected from SEQ ID NOs: 4348-4372. In some embodiments, the at least one guide RNA has a crRNA sequence having at least 90% identity to a sequence selected from SEQ ID NOs: 4348-4372. In some embodiments, the at least one guide RNA has a crRNA sequence having at least 95% identity to a sequence selected from SEQ ID NOs: 4348-4372. In some embodiments, the at least one guide RNA has a crRNA sequence selected from SEQ ID NOs: 4348-4372. In some embodiments, the joint disease or condition is arthritis, e.g., osteoarthritis. In some embodiments, the administering includes intra-articular injection of the pharmaceutical composition into the joint of the subject.

[0610] In some embodiments, the present disclosure provides a pharmaceutical composition for the treatment or prevention of a joint disease or condition, the composition including a therapeutically effective amount of one or more nucleic acids encoding a Clustered Regularly Interspaced Short Palindromic Repeats (CRISPR) gene-editing system. The system includes a CRISPR Associated Protein 9 (Cas9) protein, and at least one guide RNA targeting an OAS1 gene, wherein the target sequence is adjacent to a protospacer adjacent motif (PAM) sequence for the Cas9 protein. In some embodiments, the at least one guide RNA includes a crRNA sequence that is complementary to a target sequence in any one of exons of the OAS1 gene. In some embodiments, the at least one guide RNA includes a crRNA sequence that is complementary to a target sequence in one of exons disclosed herein of the OAS1 gene. In some embodiments, the at least one guide RNA has a crRNA sequence having at least 75% identity to a sequence selected from SEQ ID NOs: 4373-4397. In some embodiments, the at least one guide RNA has a crRNA sequence having at least 80% identity to a sequence selected from SEQ ID NOs: 4373-4397. In some embodiments, the at least one guide RNA has a crRNA sequence having at least 85% identity to a sequence selected from SEQ ID NOs: 4373-4397. In some embodiments, the at least one guide RNA has a crRNA sequence having at least 90% identity to a sequence selected from SEQ ID NOs: 4373-4397. In some embodiments, the at least one guide RNA has a crRNA sequence having at least 95% identity to a sequence selected from SEQ ID NOs: 4373-4397. In some embodiments, the at least one guide RNA has a crRNA sequence selected from SEQ ID NOs: 4373-4397.

[0611] In some embodiments, the present disclosure provides method for the treatment or prevention of a joint disease or condition in a subject in need thereof. The method includes administering, to a joint of the subject, a pharmaceutical composition including a pharmaceutically effective amount of a composition having one or more nucleic acids encoding a Clustered Regularly Interspaced Short Palindromic Repeats (CRISPR) gene-editing system. The system includes a CRISPR Associated Protein 9 (Cas9) protein, and at least one guide RNA targeting an OAS1 gene, wherein the target sequence is adjacent to a protospacer adjacent motif (PAM) sequence for the Cas9 protein. In some embodiments, the at least one guide RNA includes a crRNA sequence that is complementary to a target sequence in any one of exons of the OAS1 gene. In some embodiments, the at least one guide RNA includes a crRNA sequence that is complementary to a target sequence in one of exons disclosed herein of the OAS1 gene. In some embodiments, the at least one guide RNA has a crRNA sequence having at least 75% identity to a sequence selected from SEQ ID NOs: 4373-4397. In some embodiments, the at least one guide RNA has a crRNA sequence having at least 80% identity to a sequence selected from SEQ ID NOs: 4373-4397. In some embodiments, the at least one guide RNA has a crRNA sequence having at least 85% identity to a sequence selected from SEQ ID NOs: 4373-4397. In some embodiments, the at least one guide RNA has a crRNA sequence having at least 90% identity to a sequence selected from SEQ ID NOs: 4373-4397. In some embodiments, the at least one guide RNA has a crRNA sequence having at least 95% identity to a sequence selected from SEQ ID NOs: 4373-4397. In some embodiments, the at least one guide RNA has a crRNA sequence selected from SEQ ID NOs: 4373-4397. In some embodiments, the joint disease or condition is arthritis, e.g., osteoarthritis. In some embodiments, the administering includes intra-articular injection of the pharmaceutical composition into the joint of the subject.

[0612] In some embodiments, the present disclosure provides a pharmaceutical composition for the treatment or prevention of a joint disease or condition, the composition including a therapeutically effective amount of one or more nucleic acids encoding a Clustered Regularly Interspaced Short Palindromic Repeats (CRISPR) gene-editing system. The system includes a CRISPR Associated Protein 9 (Cas9) protein, and at least one guide RNA targeting an OAS2 gene, wherein the target sequence is adjacent to a protospacer adjacent motif (PAM) sequence for the Cas9 protein. In some embodiments, the at least one guide RNA includes a crRNA sequence that is complementary to a target sequence in any one of exons of the OAS2 gene. In some embodiments, the at least one guide RNA includes a crRNA sequence that is complementary to a target sequence in one of exons disclosed herein of the OAS2 gene. In some embodiments, the at least one guide RNA has a crRNA sequence having at least 75% identity to a sequence selected from SEQ ID NOs: 4398-4422. In some embodiments, the at least one guide RNA has a crRNA sequence having at least 80% identity to a sequence selected from SEQ ID NOs: 4398-4422. In some embodiments, the at least one guide RNA has a crRNA sequence having at least 85% identity to a sequence selected from SEQ ID NOs: 4398-4422. In some embodiments, the at least one guide RNA has a crRNA sequence having at least 90% identity to a sequence selected from SEQ ID NOs: 4398-4422. In some embodiments, the at least one guide RNA has a crRNA sequence having at least 95% identity to a sequence selected from SEQ ID NOs: 4398-4422. In some embodiments, the at least one guide RNA has a crRNA sequence selected from SEQ ID NOs: 4398-4422.

[0613] In some embodiments, the present disclosure provides method for the treatment or prevention of a joint disease or condition in a subject in need thereof. The method includes administering, to a joint of the subject, a pharmaceutical composition including a pharmaceutically effective amount of a composition having one or more nucleic acids encoding a Clustered Regularly Interspaced Short Palindromic Repeats (CRISPR) gene-editing system. The system includes a CRISPR Associated Protein 9 (Cas9) protein, and at least one guide RNA targeting an OAS2 gene, wherein the target sequence is adjacent to a protospacer adjacent motif (PAM) sequence for the Cas9 protein. In some embodiments, the at least one guide RNA includes a crRNA sequence that is complementary to a target sequence in any one of exons of the OAS2 gene. In some embodiments, the at least one guide RNA includes a crRNA sequence that is complementary to a target sequence in one of exons disclosed herein of the OAS2 gene. In some embodiments, the at least one guide RNA has a crRNA sequence having at least 75% identity to a sequence selected from SEQ ID NOs: 4398-4422. In some embodiments, the at least one guide RNA has a crRNA sequence having at least 80% identity to a sequence selected from SEQ ID NOs: 4398-4422. In some embodiments, the at least one guide RNA has a crRNA sequence having at least 85% identity to a sequence selected from SEQ ID NOs: 4398-4422. In some embodiments, the at least one guide RNA has a crRNA sequence having at least 90% identity to a sequence selected from SEQ ID NOs: 4398-4422. In some embodiments, the at least one guide RNA has a crRNA sequence having at least 95% identity to a sequence selected from SEQ ID NOs: 4398-4422. In some embodiments, the at least one guide RNA has a crRNA sequence selected from SEQ ID NOs: 4398-4422. In some embodiments, the joint disease or condition is arthritis, e.g., osteoarthritis. In some embodiments, the administering includes intra-articular injection of the pharmaceutical composition into the joint of the subject.

[0614] In some embodiments, the present disclosure provides a pharmaceutical composition for the treatment or prevention of a joint disease or condition, the composition including a therapeutically effective amount of one or more nucleic acids encoding a Clustered Regularly Interspaced Short Palindromic Repeats (CRISPR) gene-editing system. The system includes a CRISPR Associated Protein 9 (Cas9) protein, and at least one guide RNA targeting an OASL gene, wherein the target sequence is adjacent to a protospacer adjacent motif (PAM) sequence for the Cas9 protein. In some embodiments, the at least one guide RNA includes a crRNA sequence that is complementary to a target sequence in any one of exons of the OASL gene. In some embodiments, the at least one guide RNA includes a crRNA sequence that is complementary to a target sequence in one of exons disclosed herein of the OASL gene. In some embodiments, the at least one guide RNA has a crRNA sequence having at least 75% identity to a sequence selected from SEQ ID NOs: 4423-4447. In some embodiments, the at least one guide RNA has a crRNA sequence having at least 80% identity to a sequence selected from SEQ ID NOs: 4423-4447. In some embodiments, the at least one guide RNA has a crRNA sequence having at least 85% identity to a sequence selected from SEQ ID NOs: 4423-4447. In some embodiments, the at least one guide RNA has a crRNA sequence having at least 90% identity to a sequence selected from SEQ ID NOs: 4423-4447. In some embodiments, the at least one guide RNA has a crRNA sequence having at least 95% identity to a sequence selected from SEQ ID NOs: 4423-4447. In some embodiments, the at least one guide RNA has a crRNA sequence selected from SEQ ID NOs: 4423-4447.

[0615] In some embodiments, the present disclosure provides method for the treatment or prevention of a joint disease or condition in a subject in need thereof. The method includes administering, to a joint of the subject, a pharmaceutical composition including a pharmaceutically effective amount of a composition having one or more nucleic acids encoding a Clustered Regularly Interspaced Short Palindromic Repeats (CRISPR) gene-editing system. The system includes a CRISPR Associated Protein 9 (Cas9) protein, and at least one guide RNA targeting an OASL gene, wherein the target sequence is adjacent to a protospacer adjacent motif (PAM) sequence for the Cas9 protein. In some embodiments, the at least one guide RNA includes a crRNA sequence that is complementary to a target sequence in any one of exons of the OASL gene. In some embodiments, the at least one guide RNA includes a crRNA sequence that is complementary to a target sequence in one of exons disclosed herein of the OASL gene. In some embodiments, the at least one guide RNA has a crRNA sequence having at least 75% identity to a sequence selected from SEQ ID NOs: 4423-4447. In some embodiments, the at least one guide RNA has a crRNA sequence having at least 80% identity to a sequence selected from SEQ ID NOs: 4423-4447. In some embodiments, the at least one guide RNA has a crRNA sequence having at least 85% identity to a sequence selected from SEQ ID NOs: 4423-4447. In some embodiments, the at least one guide RNA has a crRNA sequence having at least 90% identity to a sequence selected from SEQ ID NOs: 4423-4447. In some embodiments, the at least one guide RNA has a crRNA sequence having at least 95% identity to a sequence selected from SEQ ID NOs: 4423-4447. In some embodiments, the at least one guide RNA has a crRNA sequence selected from SEQ ID NOs: 4423-4447. In some embodiments, the joint disease or condition is arthritis, e.g., osteoarthritis. In some embodiments, the administering includes intra-articular injection of the pharmaceutical composition into the joint of the subject.

[0616] In some embodiments, the present disclosure provides a pharmaceutical composition for the treatment or prevention of a joint disease or condition, the composition including a therapeutically effective amount of one or more nucleic acids encoding a Clustered Regularly Interspaced Short Palindromic Repeats (CRISPR) gene-editing system. The system includes a CRISPR Associated Protein 9 (Cas9) protein, and at least one guide RNA targeting an PRKN gene, wherein the target sequence is adjacent to a protospacer adjacent motif (PAM) sequence for the Cas9 protein. In some embodiments, the at least one guide RNA includes a crRNA sequence that is complementary to a target sequence in any one of exons of the PRKN gene. In some embodiments, the at least one guide RNA includes a crRNA sequence that is complementary to a target sequence in one of exons disclosed herein of the PRKN gene. In some embodiments, the at least one guide RNA has a crRNA sequence having at least 75% identity to a sequence selected from SEQ ID NOs: 4448-4472. In some embodiments, the at least one guide RNA has a crRNA sequence having at least 80% identity to a sequence selected from SEQ ID NOs: 4448-4472. In some embodiments, the at least one guide RNA has a crRNA sequence having at least 85% identity to a sequence selected from SEQ ID NOs: 4448-4472. In some embodiments, the at least one guide RNA has a crRNA sequence having at least 90% identity to a sequence selected from SEQ ID NOs: 4448-4472. In some embodiments, the at least one guide RNA has a crRNA sequence having at least 95% identity to a sequence selected from SEQ ID NOs: 4448-4472. In some embodiments, the at least one guide RNA has a crRNA sequence selected from SEQ ID NOs: 4448-4472.

[0617] In some embodiments, the present disclosure provides method for the treatment or prevention of a joint disease or condition in a subject in need thereof. The method includes administering, to a joint of the subject, a pharmaceutical composition including a pharmaceutically effective amount of a composition having one or more nucleic acids encoding a Clustered Regularly Interspaced Short Palindromic Repeats (CRISPR) gene-editing system. The system includes a CRISPR Associated Protein 9 (Cas9) protein, and at least one guide RNA targeting an PRKN gene, wherein the target sequence is adjacent to a protospacer adjacent motif (PAM) sequence for the Cas9 protein. In some embodiments, the at least one guide RNA includes a crRNA sequence that is complementary to a target sequence in any one of exons of the PRKN gene. In some embodiments, the at least one guide RNA includes a crRNA sequence that is complementary to a target sequence in one of exons disclosed herein of the PRKN gene. In some embodiments, the at least one guide RNA has a crRNA sequence having at least 75% identity to a sequence selected from SEQ ID NOs: 4448-4472. In some embodiments, the at least one guide RNA has a crRNA sequence having at least 80% identity to a sequence selected from SEQ ID NOs: 4448-4472. In some embodiments, the at least one guide RNA has a crRNA sequence having at least 85% identity to a sequence selected from SEQ ID NOs: 4448-4472. In some embodiments, the at least one guide RNA has a crRNA sequence having at least 90% identity to a sequence selected from SEQ ID NOs: 4448-4472. In some embodiments, the at least one guide RNA has a crRNA sequence having at least 95% identity to a sequence selected from SEQ ID NOs: 4448-4472. In some embodiments, the at least one guide RNA has a crRNA sequence selected from SEQ ID NOs: 4448-4472. In some embodiments, the joint disease or condition is arthritis, e.g., osteoarthritis. In some embodiments, the administering includes intra-articular injection of the pharmaceutical composition into the joint of the subject.

[0618] In some embodiments, the present disclosure provides a pharmaceutical composition for the treatment or prevention of a joint disease or condition, the composition including a therapeutically effective amount of one or more nucleic acids encoding a Clustered Regularly Interspaced Short Palindromic Repeats (CRISPR) gene-editing system. The system includes a CRISPR Associated Protein 9 (Cas9) protein, and at least one guide RNA targeting an PDCD1 gene, wherein the target sequence is adjacent to a protospacer adjacent motif (PAM) sequence for the Cas9 protein. In some embodiments, the at least one guide RNA includes a crRNA sequence that is complementary to a target sequence in any one of exons of the PDCD1 gene. In some embodiments, the at least one guide RNA includes a crRNA sequence that is complementary to a target sequence in one of exons disclosed herein of the PDCD1 gene. In some embodiments, the at least one guide RNA has a crRNA sequence having at least 75% identity to a sequence selected from SEQ ID NOs: 4473-4497. In some embodiments, the at least one guide RNA has a crRNA sequence having at least 80% identity to a sequence selected from SEQ ID NOs: 4473-4497. In some embodiments, the at least one guide RNA has a crRNA sequence having at least 85% identity to a sequence selected from SEQ ID NOs: 4473-4497. In some embodiments, the at least one guide RNA has a crRNA sequence having at least 90% identity to a sequence selected from SEQ ID NOs: 4473-4497. In some embodiments, the at least one guide RNA has a crRNA sequence having at least 95% identity to a sequence selected from SEQ ID NOs: 4473-4497. In some embodiments, the at least one guide RNA has a crRNA sequence selected from SEQ ID NOs: 4473-4497.

[0619] In some embodiments, the present disclosure provides method for the treatment or prevention of a joint disease or condition in a subject in need thereof. The method includes administering, to a joint of the subject, a pharmaceutical composition including a pharmaceutically effective amount of a composition having one or more nucleic acids encoding a Clustered Regularly Interspaced Short Palindromic Repeats (CRISPR) gene-editing system. The system includes a CRISPR Associated Protein 9 (Cas9) protein, and at least one guide RNA targeting an PDCD1 gene, wherein the target sequence is adjacent to a protospacer adjacent motif (PAM) sequence for the Cas9 protein. In some embodiments, the at least one guide RNA includes a crRNA sequence that is complementary to a target sequence in any one of exons of the PDCD1 gene. In some embodiments, the at least one guide RNA includes a crRNA sequence that is complementary to a target sequence in one of exons disclosed herein of the PDCD1 gene. In some embodiments, the at least one guide RNA has a crRNA sequence having at least 75% identity to a sequence selected from SEQ ID NOs: 4473-4497. In some embodiments, the at least one guide RNA has a crRNA sequence having at least 80% identity to a sequence selected from SEQ ID NOs: 4473-4497. In some embodiments, the at least one guide RNA has a crRNA sequence having at least 85% identity to a sequence selected from SEQ ID NOs: 4473-4497. In some embodiments, the at least one guide RNA has a crRNA sequence having at least 90% identity to a sequence selected from SEQ ID NOs: 4473-4497. In some embodiments, the at least one guide RNA has a crRNA sequence having at least 95% identity to a sequence selected from SEQ ID NOs: 4473-4497. In some embodiments, the at least one guide RNA has a crRNA sequence selected from SEQ ID NOs: 4473-4497. In some embodiments, the joint disease or condition is arthritis, e.g., osteoarthritis. In some embodiments, the administering includes intra-articular injection of the pharmaceutical composition into the joint of the subject.

[0620] In some embodiments, the present disclosure provides a pharmaceutical composition for the treatment or prevention of a joint disease or condition, the composition including a therapeutically effective amount of one or more nucleic acids encoding a Clustered Regularly Interspaced Short Palindromic Repeats (CRISPR) gene-editing system. The system includes a CRISPR Associated Protein 9 (Cas9) protein, and at least one guide RNA targeting an PLEKHG1 gene, wherein the target sequence is adjacent to a protospacer adjacent motif (PAM) sequence for the Cas9 protein. In some embodiments, the at least one guide RNA includes a crRNA sequence that is complementary to a target sequence in any one of exons of the PLEKHG1 gene. In some embodiments, the at least one guide RNA includes a crRNA sequence that is complementary to a target sequence in one of exons disclosed herein of the PLEKHG1 gene. In some embodiments, the at least one guide RNA has a crRNA sequence having at least 75% identity to a sequence selected from SEQ ID NOs: 4498-4522. In some embodiments, the at least one guide RNA has a crRNA sequence having at least 80% identity to a sequence selected from SEQ ID NOs: 4498-4522. In some embodiments, the at least one guide RNA has a crRNA sequence having at least 85% identity to a sequence selected from SEQ ID NOs: 4498-4522. In some embodiments, the at least one guide RNA has a crRNA sequence having at least 90% identity to a sequence selected from SEQ ID NOs: 4498-4522. In some embodiments, the at least one guide RNA has a crRNA sequence having at least 95% identity to a sequence selected from SEQ ID NOs: 4498-4522. In some embodiments, the at least one guide RNA has a crRNA sequence selected from SEQ ID NOs: 4498-4522.

[0621] In some embodiments, the present disclosure provides method for the treatment or prevention of a joint disease or condition in a subject in need thereof. The method includes administering, to a joint of the subject, a pharmaceutical composition including a pharmaceutically effective amount of a composition having one or more nucleic acids encoding a Clustered Regularly Interspaced Short Palindromic Repeats (CRISPR) gene-editing system. The system includes a CRISPR Associated Protein 9 (Cas9) protein, and at least one guide RNA targeting an PLEKHG1 gene, wherein the target sequence is adjacent to a protospacer adjacent motif (PAM) sequence for the Cas9 protein. In some embodiments, the at least one guide RNA includes a crRNA sequence that is complementary to a target sequence in any one of exons of the PLEKHG1 gene. In some embodiments, the at least one guide RNA includes a crRNA sequence that is complementary to a target sequence in one of exons disclosed herein of the PLEKHG1 gene. In some embodiments, the at least one guide RNA has a crRNA sequence having at least 75% identity to a sequence selected from SEQ ID NOs: 4498-4522. In some embodiments, the at least one guide RNA has a crRNA sequence having at least 80% identity to a sequence selected from SEQ ID NOs: 4498-4522. In some embodiments, the at least one guide RNA has a crRNA sequence having at least 85% identity to a sequence selected from SEQ ID NOs: 4498-4522. In some embodiments, the at least one guide RNA has a crRNA sequence having at least 90% identity to a sequence selected from SEQ ID NOs: 4498-4522. In some embodiments, the at least one guide RNA has a crRNA sequence having at least 95% identity to a sequence selected from SEQ ID NOs: 4498-4522. In some embodiments, the at least one guide RNA has a crRNA sequence selected from SEQ ID NOs: 4498-4522. In some embodiments, the joint disease or condition is arthritis, e.g., osteoarthritis. In some embodiments, the administering includes intra-articular injection of the pharmaceutical composition into the joint of the subject.

[0622] In some embodiments, the present disclosure provides a pharmaceutical composition for the treatment or prevention of a joint disease or condition, the composition including a therapeutically effective amount of one or more nucleic acids encoding a Clustered Regularly Interspaced Short Palindromic Repeats (CRISPR) gene-editing system. The system includes a CRISPR Associated Protein 9 (Cas9) protein, and at least one guide RNA targeting an PRKCA gene, wherein the target sequence is adjacent to a protospacer adjacent motif (PAM) sequence for the Cas9 protein. In some embodiments, the at least one guide RNA includes a crRNA sequence that is complementary to a target sequence in any one of exons of the PRKCA gene. In some embodiments, the at least one guide RNA includes a crRNA sequence that is complementary to a target sequence in one of exons disclosed herein of the PRKCA gene. In some embodiments, the at least one guide RNA has a crRNA sequence having at least 75% identity to a sequence selected from SEQ ID NOs: 4523-4547. In some embodiments, the at least one guide RNA has a crRNA sequence having at least 80% identity to a sequence selected from SEQ ID NOs: 4523-4547. In some embodiments, the at least one guide RNA has a crRNA sequence having at least 85% identity to a sequence selected from SEQ ID NOs: 4523-4547. In some embodiments, the at least one guide RNA has a crRNA sequence having at least 90% identity to a sequence selected from SEQ ID NOs: 4523-4547. In some embodiments, the at least one guide RNA has a crRNA sequence having at least 95% identity to a sequence selected from SEQ ID NOs: 4523-4547. In some embodiments, the at least one guide RNA has a crRNA sequence selected from SEQ ID NOs: 4523-4547.

[0623] In some embodiments, the present disclosure provides method for the treatment or prevention of a joint disease or condition in a subject in need thereof. The method includes administering, to a joint of the subject, a pharmaceutical composition including a pharmaceutically effective amount of a composition having one or more nucleic acids encoding a Clustered Regularly Interspaced Short Palindromic Repeats (CRISPR) gene-editing system. The system includes a CRISPR Associated Protein 9 (Cas9) protein, and at least one guide RNA targeting an PRKCA gene, wherein the target sequence is adjacent to a protospacer adjacent motif (PAM) sequence for the Cas9 protein. In some embodiments, the at least one guide RNA includes a crRNA sequence that is complementary to a target sequence in any one of exons of the PRKCA gene. In some embodiments, the at least one guide RNA includes a crRNA sequence that is complementary to a target sequence in one of exons disclosed herein of the PRKCA gene. In some embodiments, the at least one guide RNA has a crRNA sequence having at least 75% identity to a sequence selected from SEQ ID NOs: 4523-4547. In some embodiments, the at least one guide RNA has a crRNA sequence having at least 80% identity to a sequence selected from SEQ ID NOs: 4523-4547. In some embodiments, the at least one guide RNA has a crRNA sequence having at least 85% identity to a sequence selected from SEQ ID NOs: 4523-4547. In some embodiments, the at least one guide RNA has a crRNA sequence having at least 90% identity to a sequence selected from SEQ ID NOs: 4523-4547. In some embodiments, the at least one guide RNA has a crRNA sequence having at least 95% identity to a sequence selected from SEQ ID NOs: 4523-4547. In some embodiments, the at least one guide RNA has a crRNA sequence selected from SEQ ID NOs: 4523-4547. In some embodiments, the joint disease or condition is arthritis, e.g., osteoarthritis. In some embodiments, the administering includes intra-articular injection of the pharmaceutical composition into the joint of the subject.

[0624] In some embodiments, the present disclosure provides a pharmaceutical composition for the treatment or prevention of a joint disease or condition, the composition including a therapeutically effective amount of one or more nucleic acids encoding a Clustered Regularly Interspaced Short Palindromic Repeats (CRISPR) gene-editing system. The system includes a CRISPR Associated Protein 9 (Cas9) protein, and at least one guide RNA targeting an PTBP1 gene, wherein the target sequence is adjacent to a protospacer adjacent motif (PAM) sequence for the Cas9 protein. In some embodiments, the at least one guide RNA includes a crRNA sequence that is complementary to a target sequence in any one of exons of the PTBP1 gene. In some embodiments, the at least one guide RNA includes a crRNA sequence that is complementary to a target sequence in one of exons disclosed herein of the PTBP1 gene. In some embodiments, the at least one guide RNA has a crRNA sequence having at least 75% identity to a sequence selected from SEQ ID NOs: 4548-4572. In some embodiments, the at least one guide RNA has a crRNA sequence having at least 80% identity to a sequence selected from SEQ ID NOs: 4548-4572. In some embodiments, the at least one guide RNA has a crRNA sequence having at least 85% identity to a sequence selected from SEQ ID NOs: 4548-4572. In some embodiments, the at least one guide RNA has a crRNA sequence having at least 90% identity to a sequence selected from SEQ ID NOs: 4548-4572. In some embodiments, the at least one guide RNA has a crRNA sequence having at least 95% identity to a sequence selected from SEQ ID NOs: 4548-4572. In some embodiments, the at least one guide RNA has a crRNA sequence selected from SEQ ID NOs: 4548-4572.

[0625] In some embodiments, the present disclosure provides method for the treatment or prevention of a joint disease or condition in a subject in need thereof. The method includes administering, to a joint of the subject, a pharmaceutical composition including a pharmaceutically effective amount of a composition having one or more nucleic acids encoding a Clustered Regularly Interspaced Short Palindromic Repeats (CRISPR) gene-editing system. The system includes a CRISPR Associated Protein 9 (Cas9) protein, and at least one guide RNA targeting an PTBP1 gene, wherein the target sequence is adjacent to a protospacer adjacent motif (PAM) sequence for the Cas9 protein. In some embodiments, the at least one guide RNA includes a crRNA sequence that is complementary to a target sequence in any one of exons of the PTBP1 gene. In some embodiments, the at least one guide RNA includes a crRNA sequence that is complementary to a target sequence in one of exons disclosed herein of the PTBP1 gene. In some embodiments, the at least one guide RNA has a crRNA sequence having at least 75% identity to a sequence selected from SEQ ID NOs: 4548-4572. In some embodiments, the at least one guide RNA has a crRNA sequence having at least 80% identity to a sequence selected from SEQ ID NOs: 4548-4572. In some embodiments, the at least one guide RNA has a crRNA sequence having at least 85% identity to a sequence selected from SEQ ID NOs: 4548-4572. In some embodiments, the at least one guide RNA has a crRNA sequence having at least 90% identity to a sequence selected from SEQ ID NOs: 4548-4572. In some embodiments, the at least one guide RNA has a crRNA sequence having at least 95% identity to a sequence selected from SEQ ID NOs: 4548-4572. In some embodiments, the at least one guide RNA has a crRNA sequence selected from SEQ ID NOs: 4548-4572. In some embodiments, the joint disease or condition is arthritis, e.g., osteoarthritis. In some embodiments, the administering includes intra-articular injection of the pharmaceutical composition into the joint of the subject.

[0626] In some embodiments, the present disclosure provides a pharmaceutical composition for the treatment or prevention of a joint disease or condition, the composition including a therapeutically effective amount of one or more nucleic acids encoding a Clustered Regularly Interspaced Short Palindromic Repeats (CRISPR) gene-editing system. The system includes a CRISPR Associated Protein 9 (Cas9) protein, and at least one guide RNA targeting an PYCARD gene, wherein the target sequence is adjacent to a protospacer adjacent motif (PAM) sequence for the Cas9 protein. In some embodiments, the at least one guide RNA includes a crRNA sequence that is complementary to a target sequence in any one of exons of the PYCARD gene. In some embodiments, the at least one guide RNA includes a crRNA sequence that is complementary to a target sequence in one of exons disclosed herein of the PYCARD gene. In some embodiments, the at least one guide RNA has a crRNA sequence having at least 75% identity to a sequence selected from SEQ ID NOs: 4573-4597. In some embodiments, the at least one guide RNA has a crRNA sequence having at least 80% identity to a sequence selected from SEQ ID NOs: 4573-4597. In some embodiments, the at least one guide RNA has a crRNA sequence having at least 85% identity to a sequence selected from SEQ ID NOs: 4573-4597. In some embodiments, the at least one guide RNA has a crRNA sequence having at least 90% identity to a sequence selected from SEQ ID NOs: 4573-4597. In some embodiments, the at least one guide RNA has a crRNA sequence having at least 95% identity to a sequence selected from SEQ ID NOs: 4573-4597. In some embodiments, the at least one guide RNA has a crRNA sequence selected from SEQ ID NOs: 4573-4597.

[0627] In some embodiments, the present disclosure provides method for the treatment or prevention of a joint disease or condition in a subject in need thereof. The method includes administering, to a joint of the subject, a pharmaceutical composition including a pharmaceutically effective amount of a composition having one or more nucleic acids encoding a Clustered Regularly Interspaced Short Palindromic Repeats (CRISPR) gene-editing system. The system includes a CRISPR Associated Protein 9 (Cas9) protein, and at least one guide RNA targeting an PYCARD gene, wherein the target sequence is adjacent to a protospacer adjacent motif (PAM) sequence for the Cas9 protein. In some embodiments, the at least one guide RNA includes a crRNA sequence that is complementary to a target sequence in any one of exons of the PYCARD gene. In some embodiments, the at least one guide RNA includes a crRNA sequence that is complementary to a target sequence in one of exons disclosed herein of the PYCARD gene. In some embodiments, the at least one guide RNA has a crRNA sequence having at least 75% identity to a sequence selected from SEQ ID NOs: 4573-4597. In some embodiments, the at least one guide RNA has a crRNA sequence having at least 80% identity to a sequence selected from SEQ ID NOs: 4573-4597. In some embodiments, the at least one guide RNA has a crRNA sequence having at least 85% identity to a sequence selected from SEQ ID NOs: 4573-4597. In some embodiments, the at least one guide RNA has a crRNA sequence having at least 90% identity to a sequence selected from SEQ ID NOs: 4573-4597. In some embodiments, the at least one guide RNA has a crRNA sequence having at least 95% identity to a sequence selected from SEQ ID NOs: 4573-4597. In some embodiments, the at least one guide RNA has a crRNA sequence selected from SEQ ID NOs: 4573-4597. In some embodiments, the joint disease or condition is arthritis, e.g., osteoarthritis. In some embodiments, the administering includes intra-articular injection of the pharmaceutical composition into the joint of the subject.

[0628] In some embodiments, the present disclosure provides a pharmaceutical composition for the treatment or prevention of a joint disease or condition, the composition including a therapeutically effective amount of one or more nucleic acids encoding a Clustered Regularly Interspaced Short Palindromic Repeats (CRISPR) gene-editing system. The system includes a CRISPR Associated Protein 9 (Cas9) protein, and at least one guide RNA targeting an PYHIN1 gene, wherein the target sequence is adjacent to a protospacer adjacent motif (PAM) sequence for the Cas9 protein. In some embodiments, the at least one guide RNA includes a crRNA sequence that is complementary to a target sequence in any one of exons of the PYHIN1 gene. In some embodiments, the at least one guide RNA includes a crRNA sequence that is complementary to a target sequence in one of exons disclosed herein of the PYHIN1 gene. In some embodiments, the at least one guide RNA has a crRNA sequence having at least 75% identity to a sequence selected from SEQ ID NOs: 4598-4622. In some embodiments, the at least one guide RNA has a crRNA sequence having at least 80% identity to a sequence selected from SEQ ID NOs: 4598-4622. In some embodiments, the at least one guide RNA has a crRNA sequence having at least 85% identity to a sequence selected from SEQ ID NOs: 4598-4622. In some embodiments, the at least one guide RNA has a crRNA sequence having at least 90% identity to a sequence selected from SEQ ID NOs: 4598-4622. In some embodiments, the at least one guide RNA has a crRNA sequence having at least 95% identity to a sequence selected from SEQ ID NOs: 4598-4622. In some embodiments, the at least one guide RNA has a crRNA sequence selected from SEQ ID NOs: 4598-4622.

[0629] In some embodiments, the present disclosure provides method for the treatment or prevention of a joint disease or condition in a subject in need thereof. The method includes administering, to a joint of the subject, a pharmaceutical composition including a pharmaceutically effective amount of a composition having one or more nucleic acids encoding a Clustered Regularly Interspaced Short Palindromic Repeats (CRISPR) gene-editing system. The system includes a CRISPR Associated Protein 9 (Cas9) protein, and at least one guide RNA targeting an PYHIN1 gene, wherein the target sequence is adjacent to a protospacer adjacent motif (PAM) sequence for the Cas9 protein. In some embodiments, the at least one guide RNA includes a crRNA sequence that is complementary to a target sequence in any one of exons of the PYHIN1 gene. In some embodiments, the at least one exons disclosed herein of the PYHIN1 gene. In some embodiments, the at least one guide RNA has a crRNA sequence having at least 75% identity to a sequence selected from SEQ ID NOs: 4598-4622. In some embodiments, the at least one guide RNA has a crRNA sequence having at least 80% identity to a sequence selected from SEQ ID NOs: 4598-4622. In some embodiments, the at least one guide RNA has a crRNA sequence having at least 85% identity to a sequence selected from SEQ ID NOs: 4598-4622. In some embodiments, the at least one guide RNA has a crRNA sequence having at least 90% identity to a sequence selected from SEQ ID NOs: 4598-4622. In some embodiments, the at least one guide RNA has a crRNA sequence having at least 95% identity to a sequence selected from SEQ ID NOs: 4598-4622. In some embodiments, the at least one guide RNA has a crRNA sequence selected from SEQ ID NOs: 4598-4622. In some embodiments, the joint disease or condition is arthritis, e.g., osteoarthritis. In some embodiments, the administering includes intra-articular injection of the pharmaceutical composition into the joint of the subject.

[0630] In some embodiments, the present disclosure provides a pharmaceutical composition for the treatment or prevention of a joint disease or condition, the composition including a therapeutically effective amount of one or more nucleic acids encoding a Clustered Regularly Interspaced Short Palindromic Repeats (CRISPR) gene-editing system. The system includes a CRISPR Associated Protein 9 (Cas9) protein, and at least one guide RNA targeting an DDX58 gene, wherein the target sequence is adjacent to a protospacer adjacent motif (PAM) sequence for the Cas9 protein. In some embodiments, the at least one guide RNA includes a crRNA sequence that is complementary to a target sequence in any one of exons of the DDX58 gene. In some embodiments, the at least one guide RNA includes a crRNA sequence that is complementary to a target sequence in one of exons disclosed herein of the DDX58 gene. In some embodiments, the at least one guide RNA has a crRNA sequence having at least 75% identity to a sequence selected from SEQ ID NOs: 4623-4647. In some embodiments, the at least one guide RNA has a crRNA sequence having at least 80% identity to a sequence selected from SEQ ID NOs: 4623-4647. In some embodiments, the at least one guide RNA has a crRNA sequence having at least 85% identity to a sequence selected from SEQ ID NOs: 4623-4647. In some embodiments, the at least one guide RNA has a crRNA sequence having at least 90% identity to a sequence selected from SEQ ID NOs: 4623-4647. In some embodiments, the at least one guide RNA has a crRNA sequence having at least 95% identity to a sequence selected from SEQ ID NOs: 4623-4647. In some embodiments, the at least one guide RNA has a crRNA sequence selected from SEQ ID NOs: 4623-4647.

[0631] In some embodiments, the present disclosure provides method for the treatment or prevention of a joint disease or condition in a subject in need thereof. The method includes administering, to a joint of the subject, a pharmaceutical composition including a pharmaceutically effective amount of a composition having one or more nucleic acids encoding a Clustered Regularly Interspaced Short Palindromic Repeats (CRISPR) gene-editing system. The system includes a CRISPR Associated Protein 9 (Cas9) protein, and at least one guide RNA targeting an DDX58 gene, wherein the target sequence is adjacent to a protospacer adjacent motif (PAM) sequence for the Cas9 protein. In some embodiments, the at least one guide RNA includes a crRNA sequence that is complementary to a target sequence in any one of exons of the DDX58 gene. In some embodiments, the at least one guide RNA includes a crRNA sequence that is complementary to a target sequence in one of exons disclosed herein of the DDX58 gene. In some embodiments, the at least one guide RNA has a crRNA sequence having at least 75% identity to a sequence selected from SEQ ID NOs: 4623-4647. In some embodiments, the at least one guide RNA has a crRNA sequence having at least 80% identity to a sequence selected from SEQ ID NOs: 4623-4647. In some embodiments, the at least one guide RNA has a crRNA sequence having at least 85% identity to a sequence selected from SEQ ID NOs: 4623-4647. In some embodiments, the at least one guide RNA has a crRNA sequence having at least 90% identity to a sequence selected from SEQ ID NOs: 4623-4647. In some embodiments, the at least one guide RNA has a crRNA sequence having at least 95% identity to a sequence selected from SEQ ID NOs: 4623-4647. In some embodiments, the at least one guide RNA has a crRNA sequence selected from SEQ ID NOs: 4623-4647. In some embodiments, the joint disease or condition is arthritis, e.g., osteoarthritis. In some embodiments, the administering includes intra-articular injection of the pharmaceutical composition into the joint of the subject.

[0632] In some embodiments, the present disclosure provides a pharmaceutical composition for the treatment or prevention of a joint disease or condition, the composition including a therapeutically effective amount of one or more nucleic acids encoding a Clustered Regularly Interspaced Short Palindromic Repeats (CRISPR) gene-editing system. The system includes a CRISPR Associated Protein 9 (Cas9) protein, and at least one guide RNA targeting an RFC3 gene, wherein the target sequence is adjacent to a protospacer adjacent motif (PAM) sequence for the Cas9 protein. In some embodiments, the at least one guide RNA includes a crRNA sequence that is complementary to a target sequence in any one of exons of the RFC3 gene. In some embodiments, the at least one guide RNA includes a crRNA sequence that is complementary to a target sequence in one of exons disclosed herein of the RFC3 gene. In some embodiments, the at least one guide RNA has a crRNA sequence having at least 75% identity to a sequence selected from SEQ ID NOs: 4648-4672. In some embodiments, the at least one guide RNA has a crRNA sequence having at least 80% identity to a sequence selected from SEQ ID NOs: 4648-4672. In some embodiments, the at least one guide RNA has a crRNA sequence having at least 85% identity to a sequence selected from SEQ ID NOs: 4648-4672. In some embodiments, the at least one guide RNA has a crRNA sequence having at least 90% identity to a sequence selected from SEQ ID NOs: 4648-4672. In some embodiments, the at least one guide RNA has a crRNA sequence having at least 95% identity to a sequence selected from SEQ ID NOs: 4648-4672. In some embodiments, the at least one guide RNA has a crRNA sequence selected from SEQ ID NOs: 4648-4672.

[0633] In some embodiments, the present disclosure provides method for the treatment or prevention of a joint disease or condition in a subject in need thereof. The method includes administering, to a joint of the subject, a pharmaceutical composition including a pharmaceutically effective amount of a composition having one or more nucleic acids encoding a Clustered Regularly Interspaced Short Palindromic Repeats (CRISPR) gene-editing system. The system includes a CRISPR Associated Protein 9 (Cas9) protein, and at least one guide RNA targeting an RFC3 gene, wherein the target sequence is adjacent to a protospacer adjacent motif (PAM) sequence for the Cas9 protein. In some embodiments, the at least one guide RNA includes a crRNA sequence that is complementary to a target sequence in any one of exons of the RFC3 gene. In some embodiments, the at least one guide RNA includes a crRNA sequence that is complementary to a target sequence in one of exons disclosed herein of the RFC3 gene. In some embodiments, the at least one guide RNA has a crRNA sequence having at least 75% identity to a sequence selected from SEQ ID NOs: 4648-4672. In some embodiments, the at least one guide RNA has a crRNA sequence having at least 80% identity to a sequence selected from SEQ ID NOs: 4648-4672. In some embodiments, the at least one guide RNA has a crRNA sequence having at least 85% identity to a sequence selected from SEQ ID NOs: 4648-4672. In some embodiments, the at least one guide RNA has a crRNA sequence having at least 90% identity to a sequence selected from SEQ ID NOs: 4648-4672. In some embodiments, the at least one guide RNA has a crRNA sequence having at least 95% identity to a sequence selected from SEQ ID NOs: 4648-4672. In some embodiments, the at least one guide RNA has a crRNA sequence selected from SEQ ID NOs: 4648-4672. In some embodiments, the joint disease or condition is arthritis, e.g., osteoarthritis. In some embodiments, the administering includes intra-articular injection of the pharmaceutical composition into the joint of the subject.

[0634] In some embodiments, the present disclosure provides a pharmaceutical composition for the treatment or prevention of a joint disease or condition, the composition including a therapeutically effective amount of one or more nucleic acids encoding a Clustered Regularly Interspaced Short Palindromic Repeats (CRISPR) gene-editing system. The system includes a CRISPR Associated Protein 9 (Cas9) protein, and at least one guide RNA targeting an RGS1 gene, wherein the target sequence is adjacent to a protospacer adjacent motif (PAM) sequence for the Cas9 protein. In some embodiments, the at least one guide RNA includes a crRNA sequence that is complementary to a target sequence in any one of exons of the RGS1 gene. In some embodiments, the at least one guide RNA includes a crRNA sequence that is complementary to a target sequence in one of exons disclosed herein of the RGS1 gene. In some embodiments, the at least one guide RNA has a crRNA sequence having at least 75% identity to a sequence selected from SEQ ID NOs: 4673-4697. In some embodiments, the at least one guide RNA has a crRNA sequence having at least 80% identity to a sequence selected from SEQ ID NOs: 4673-4697. In some embodiments, the at least one guide RNA has a crRNA sequence having at least 85% identity to a sequence selected from SEQ ID NOs: 4673-4697. In some embodiments, the at least one guide RNA has a crRNA sequence having at least 90% identity to a sequence selected from SEQ ID NOs: 4673-4697. In some embodiments, the at least one guide RNA has a crRNA sequence having at least 95% identity to a sequence selected from SEQ ID NOs: 4673-4697. In some embodiments, the at least one guide RNA has a crRNA sequence selected from SEQ ID NOs: 4673-4697.

[0635] In some embodiments, the present disclosure provides method for the treatment or prevention of a joint disease or condition in a subject in need thereof. The method includes administering, to a joint of the subject, a pharmaceutical composition including a pharmaceutically effective amount of a composition having one or more nucleic acids encoding a Clustered Regularly Interspaced Short Palindromic Repeats (CRISPR) gene-editing system. The system includes a CRISPR Associated Protein 9 (Cas9) protein, and at least one guide RNA targeting an RGS1 gene, wherein the target sequence is adjacent to a protospacer adjacent motif (PAM) sequence for the Cas9 protein. In some embodiments, the at least one guide RNA includes a crRNA sequence that is complementary to a target sequence in any one of exons of the RGS1 gene. In some embodiments, the at least one guide RNA includes a crRNA sequence that is complementary to a target sequence in one of exons disclosed herein of the RGS1 gene. In some embodiments, the at least one guide RNA has a crRNA sequence having at least 75% identity to a sequence selected from SEQ ID NOs: 4673-4697. In some embodiments, the at least one guide RNA has a crRNA sequence having at least 80% identity to a sequence selected from SEQ ID NOs: 4673-4697. In some embodiments, the at least one guide RNA has a crRNA sequence having at least 85% identity to a sequence selected from SEQ ID NOs: 4673-4697. In some embodiments, the at least one guide RNA has a crRNA sequence having at least 90% identity to a sequence selected from SEQ ID NOs: 4673-4697. In some embodiments, the at least one guide RNA has a crRNA sequence having at least 95% identity to a sequence selected from SEQ ID NOs: 4673-4697. In some embodiments, the at least one guide RNA has a crRNA sequence selected from SEQ ID NOs: 4673-4697. In some embodiments, the joint disease or condition is arthritis, e.g., osteoarthritis. In some embodiments, the administering includes intra-articular injection of the pharmaceutical composition into the joint of the subject.

[0636] In some embodiments, the present disclosure provides a pharmaceutical composition for the treatment or prevention of a joint disease or condition, the composition including a therapeutically effective amount of one or more nucleic acids encoding a Clustered Regularly Interspaced Short Palindromic Repeats (CRISPR) gene-editing system. The system includes a CRISPR Associated Protein 9 (Cas9) protein, and at least one guide RNA targeting an SAMHD1 gene, wherein the target sequence is adjacent to a protospacer adjacent motif (PAM) sequence for the Cas9 protein. In some embodiments, the at least one guide RNA includes a crRNA sequence that is complementary to a target sequence in any one of exons of the SAMHD1 gene. In some embodiments, the at least one guide RNA includes a crRNA sequence that is complementary to a target sequence in one of exons disclosed herein of the SAMHD1 gene. In some embodiments, the at least one guide RNA has a crRNA sequence having at least 75% identity to a sequence selected from SEQ ID NOs: 4698-4722. In some embodiments, the at least one guide RNA has a crRNA sequence having at least 80% identity to a sequence selected from SEQ ID NOs: 4698-4722. In some embodiments, the at least one guide RNA has a crRNA sequence having at least 85% identity to a sequence selected from SEQ ID NOs: 4698-4722. In some embodiments, the at least one guide RNA has a crRNA sequence having at least 90% identity to a sequence selected from SEQ ID NOs: 4698-4722. In some embodiments, the at least one guide RNA has a crRNA sequence having at least 95% identity to a sequence selected from SEQ ID NOs: 4698-4722. In some embodiments, the at least one guide RNA has a crRNA sequence selected from SEQ ID NOs: 4698-4722.

[0637] In some embodiments, the present disclosure provides method for the treatment or prevention of a joint disease or condition in a subject in need thereof. The method includes administering, to a joint of the subject, a pharmaceutical composition including a pharmaceutically effective amount of a composition having one or more nucleic acids encoding a Clustered Regularly Interspaced Short Palindromic Repeats (CRISPR) gene-editing system. The system includes a CRISPR Associated Protein 9 (Cas9) protein, and at least one guide RNA targeting an SAMHD1 gene, wherein the target sequence is adjacent to a protospacer adjacent motif (PAM) sequence for the Cas9 protein. In some embodiments, the at least one guide RNA includes a crRNA sequence that is complementary to a target sequence in any one of exons of the SAMHD1 gene. In some embodiments, the at least one guide RNA includes a crRNA sequence that is complementary to a target sequence in one of exons disclosed herein of the SAMHD1 gene. In some embodiments, the at least one guide RNA has a crRNA sequence having at least 75% identity to a sequence selected from SEQ ID NOs: 4698-4722. In some embodiments, the at least one guide RNA has a crRNA sequence having at least 80% identity to a sequence selected from SEQ ID NOs: 4698-4722. In some embodiments, the at least one guide RNA has a crRNA sequence having at least 85% identity to a sequence selected from SEQ ID NOs: 4698-4722. In some embodiments, the at least one guide RNA has a crRNA sequence having at least 90% identity to a sequence selected from SEQ ID NOs: 4698-4722. In some embodiments, the at least one guide RNA has a crRNA sequence having at least 95% identity to a sequence selected from SEQ ID NOs: 4698-4722. In some embodiments, the at least one guide RNA has a crRNA sequence selected from SEQ ID NOs: 4698-4722. In some embodiments, the joint disease or condition is arthritis, e.g., osteoarthritis. In some embodiments, the administering includes intra-articular injection of the pharmaceutical composition into the joint of the subject.

[0638] In some embodiments, the present disclosure provides a pharmaceutical composition for the treatment or prevention of a joint disease or condition, the composition including a therapeutically effective amount of one or more nucleic acids encoding a Clustered Regularly Interspaced Short Palindromic Repeats (CRISPR) gene-editing system. The system includes a CRISPR Associated Protein 9 (Cas9) protein, and at least one guide RNA targeting an SF3A1 gene, wherein the target sequence is adjacent to a protospacer adjacent motif (PAM) sequence for the Cas9 protein. In some embodiments, the at least one guide RNA includes a crRNA sequence that is complementary to a target sequence in any one of exons of the SF3A1 gene. In some embodiments, the at least one guide RNA includes a crRNA sequence that is complementary to a target sequence in one of exons disclosed herein of the SF3A1 gene. In some embodiments, the at least one guide RNA has a crRNA sequence having at least 75% identity to a sequence selected from SEQ ID NOs: 4723-4747. In some embodiments, the at least one guide RNA has a crRNA sequence having at least 80% identity to a sequence selected from SEQ ID NOs: 4723-4747. In some embodiments, the at least one guide RNA has a crRNA sequence having at least 85% identity to a sequence selected from SEQ ID NOs: 4723-4747. In some embodiments, the at least one guide RNA has a crRNA sequence having at least 90% identity to a sequence selected from SEQ ID NOs: 4723-4747. In some embodiments, the at least one guide RNA has a crRNA sequence having at least 95% identity to a sequence selected from SEQ ID NOs: 4723-4747. In some embodiments, the at least one guide RNA has a crRNA sequence selected from SEQ ID NOs: 4723-4747.

[0639] In some embodiments, the present disclosure provides method for the treatment or prevention of a joint disease or condition in a subject in need thereof. The method includes administering, to a joint of the subject, a pharmaceutical composition including a pharmaceutically effective amount of a composition having one or more nucleic acids encoding a Clustered Regularly Interspaced Short Palindromic Repeats (CRISPR) gene-editing system. The system includes a CRISPR Associated Protein 9 (Cas9) protein, and at least one guide RNA targeting an SF3A1 gene, wherein the target sequence is adjacent to a protospacer adjacent motif (PAM) sequence for the Cas9 protein. In some embodiments, the at least one guide RNA includes a crRNA sequence that is complementary to a target sequence in any one of exons of the SF3A1 gene. In some embodiments, the at least one guide RNA includes a crRNA sequence that is complementary to a target sequence in one of exons disclosed herein of the SF3A1 gene. In some embodiments, the at least one guide RNA has a crRNA sequence having at least 75% identity to a sequence selected from SEQ ID NOs: 4723-4747. In some embodiments, the at least one guide RNA has a crRNA sequence having at least 80% identity to a sequence selected from SEQ ID NOs: 4723-4747. In some embodiments, the at least one guide RNA has a crRNA sequence having at least 85% identity to a sequence selected from SEQ ID NOs: 4723-4747. In some embodiments, the at least one guide RNA has a crRNA sequence having at least 90% identity to a sequence selected from SEQ ID NOs: 4723-4747. In some embodiments, the at least one guide RNA has a crRNA sequence having at least 95% identity to a sequence selected from SEQ ID NOs: 4723-4747. In some embodiments, the at least one guide RNA has a crRNA sequence selected from SEQ ID NOs: 4723-4747. In some embodiments, the joint disease or condition is arthritis, e.g., osteoarthritis. In some embodiments, the administering includes intra-articular injection of the pharmaceutical composition into the joint of the subject.

[0640] In some embodiments, the present disclosure provides a pharmaceutical composition for the treatment or prevention of a joint disease or condition, the composition including a therapeutically effective amount of one or more nucleic acids encoding a Clustered Regularly Interspaced Short Palindromic Repeats (CRISPR) gene-editing system. The system includes a CRISPR Associated Protein 9 (Cas9) protein, and at least one guide RNA targeting an SF3B1 gene, wherein the target sequence is adjacent to a protospacer adjacent motif (PAM) sequence for the Cas9 protein. In some embodiments, the at least one guide RNA includes a crRNA sequence that is complementary to a target sequence in any one of exons of the SF3B1 gene. In some embodiments, the at least one guide RNA includes a crRNA sequence that is complementary to a target sequence in one of exons disclosed herein of the SF3B1 gene. In some embodiments, the at least one guide RNA has a crRNA sequence having at least 75% identity to a sequence selected from SEQ ID NOs: 4748-4772. In some embodiments, the at least one guide RNA has a crRNA sequence having at least 80% identity to a sequence selected from SEQ ID NOs: 4748-4772. In some embodiments, the at least one guide RNA has a crRNA sequence having at least 85% identity to a sequence selected from SEQ ID NOs: 4748-4772. In some embodiments, the at least one guide RNA has a crRNA sequence having at least 90% identity to a sequence selected from SEQ ID NOs: 4748-4772. In some embodiments, the at least one guide RNA has a crRNA sequence having at least 95% identity to a sequence selected from SEQ ID NOs: 4748-4772. In some embodiments, the at least one guide RNA has a crRNA sequence selected from SEQ ID NOs: 4748-4772.

[0641] In some embodiments, the present disclosure provides method for the treatment or prevention of a joint disease or condition in a subject in need thereof. The method includes administering, to a joint of the subject, a pharmaceutical composition including a pharmaceutically effective amount of a composition having one or more nucleic acids encoding a Clustered Regularly Interspaced Short Palindromic Repeats (CRISPR) gene-editing system. The system includes a CRISPR Associated Protein 9 (Cas9) protein, and at least one guide RNA targeting an SF3B1 gene, wherein the target sequence is adjacent to a protospacer adjacent motif (PAM) sequence for the Cas9 protein. In some embodiments, the at least one guide RNA includes a crRNA sequence that is complementary to a target sequence in any one of exons of the SF3B1 gene. In some embodiments, the at least one guide RNA includes a crRNA sequence that is complementary to a target sequence in one of exons disclosed herein of the SF3B1 gene. In some embodiments, the at least one guide RNA has a crRNA sequence having at least 75% identity to a sequence selected from SEQ ID NOs: 4748-4772. In some embodiments, the at least one guide RNA has a crRNA sequence having at least 80% identity to a sequence selected from SEQ ID NOs: 4748-4772. In some embodiments, the at least one guide RNA has a crRNA sequence having at least 85% identity to a sequence selected from SEQ ID NOs: 4748-4772. In some embodiments, the at least one guide RNA has a crRNA sequence having at least 90% identity to a sequence selected from SEQ ID NOs: 4748-4772. In some embodiments, the at least one guide RNA has a crRNA sequence having at least 95% identity to a sequence selected from SEQ ID NOs: 4748-4772. In some embodiments, the at least one guide RNA has a crRNA sequence selected from SEQ ID NOs: 4748-4772. In some embodiments, the joint disease or condition is arthritis, e.g., osteoarthritis. In some embodiments, the administering includes intra-articular injection of the pharmaceutical composition into the joint of the subject.

[0642] In some embodiments, the present disclosure provides a pharmaceutical composition for the treatment or prevention of a joint disease or condition, the composition including a therapeutically effective amount of one or more nucleic acids encoding a Clustered Regularly Interspaced Short Palindromic Repeats (CRISPR) gene-editing system. The system includes a CRISPR Associated Protein 9 (Cas9) protein, and at least one guide RNA targeting an SFXN2 gene, wherein the target sequence is adjacent to a protospacer adjacent motif (PAM) sequence for the Cas9 protein. In some embodiments, the at least one guide RNA includes a crRNA sequence that is complementary to a target sequence in any one of exons of the SFXN2 gene. In some embodiments, the at least one guide RNA includes a crRNA sequence that is complementary to a target sequence in one of exons disclosed herein of the SFXN2 gene. In some embodiments, the at least one guide RNA has a crRNA sequence having at least 75% identity to a sequence selected from SEQ ID NOs: 4773-4797. In some embodiments, the at least one guide RNA has a crRNA sequence having at least 80% identity to a sequence selected from SEQ ID NOs: 4773-4797. In some embodiments, the at least one guide RNA has a crRNA sequence having at least 85% identity to a sequence selected from SEQ ID NOs: 4773-4797. In some embodiments, the at least one guide RNA has a crRNA sequence having at least 90% identity to a sequence selected from SEQ ID NOs: 4773-4797. In some embodiments, the at least one guide RNA has a crRNA sequence having at least 95% identity to a sequence selected from SEQ ID NOs: 4773-4797. In some embodiments, the at least one guide RNA has a crRNA sequence selected from SEQ ID NOs: 4773-4797.

[0643] In some embodiments, the present disclosure provides method for the treatment or prevention of a joint disease or condition in a subject in need thereof. The method includes administering, to a joint of the subject, a pharmaceutical composition including a pharmaceutically effective amount of a composition having one or more nucleic acids encoding a Clustered Regularly Interspaced Short Palindromic Repeats (CRISPR) gene-editing system. The system includes a CRISPR Associated Protein 9 (Cas9) protein, and at least one guide RNA targeting an SFXN2 gene, wherein the target sequence is adjacent to a protospacer adjacent motif (PAM) sequence for the Cas9 protein. In some embodiments, the at least one guide RNA includes a crRNA sequence that is complementary to a target sequence in any one of exons of the SFXN2 gene. In some embodiments, the at least one guide RNA includes a crRNA sequence that is complementary to a target sequence in one of exons disclosed herein of the SFXN2 gene. In some embodiments, the at least one guide RNA has a crRNA sequence having at least 75% identity to a sequence selected from SEQ ID NOs: 4773-4797. In some embodiments, the at least one guide RNA has a crRNA sequence having at least 80% identity to a sequence selected from SEQ ID NOs: 4773-4797. In some embodiments, the at least one guide RNA has a crRNA sequence having at least 85% identity to a sequence selected from SEQ ID NOs: 4773-4797. In some embodiments, the at least one guide RNA has a crRNA sequence having at least 90% identity to a sequence selected from SEQ ID NOs: 4773-4797. In some embodiments, the at least one guide RNA has a crRNA sequence having at least 95% identity to a sequence selected from SEQ ID NOs: 4773-4797. In some embodiments, the at least one guide RNA has a crRNA sequence selected from SEQ ID NOs: 4773-4797. In some embodiments, the joint disease or condition is arthritis, e.g., osteoarthritis. In some embodiments, the administering includes intra-articular injection of the pharmaceutical composition into the joint of the subject.

[0644] In some embodiments, the present disclosure provides a pharmaceutical composition for the treatment or prevention of a joint disease or condition, the composition including a therapeutically effective amount of one or more nucleic acids encoding a Clustered Regularly Interspaced Short Palindromic Repeats (CRISPR) gene-editing system. The system includes a CRISPR Associated Protein 9 (Cas9) protein, and at least one guide RNA targeting an SLAMF7 gene, wherein the target sequence is adjacent to a protospacer adjacent motif (PAM) sequence for the Cas9 protein. In some embodiments, the at least one guide RNA includes a crRNA sequence that is complementary to a target sequence in any one of exons of the SLAMF7 gene. In some embodiments, the at least one guide RNA includes a crRNA sequence that is complementary to a target sequence in one of exons disclosed herein of the SLAMF7 gene. In some embodiments, the at least one guide RNA has a crRNA sequence having at least 75% identity to a sequence selected from SEQ ID NOs: 4798-4822. In some embodiments, the at least one guide RNA has a crRNA sequence having at least 80% identity to a sequence selected from SEQ ID NOs: 4798-4822. In some embodiments, the at least one guide RNA has a crRNA sequence having at least 85% identity to a sequence selected from SEQ ID NOs: 4798-4822. In some embodiments, the at least one guide RNA has a crRNA sequence having at least 90% identity to a sequence selected from SEQ ID NOs: 4798-4822. In some embodiments, the at least one guide RNA has a crRNA sequence having at least 95% identity to a sequence selected from SEQ ID NOs: 4798-4822. In some embodiments, the at least one guide RNA has a crRNA sequence selected from SEQ ID NOs: 4798-4822.

[0645] In some embodiments, the present disclosure provides method for the treatment or prevention of a joint disease or condition in a subject in need thereof. The method includes administering, to a joint of the subject, a pharmaceutical composition including a pharmaceutically effective amount of a composition having one or more nucleic acids encoding a Clustered Regularly Interspaced Short Palindromic Repeats (CRISPR) gene-editing system. The system includes a CRISPR Associated Protein 9 (Cas9) protein, and at least one guide RNA targeting an SLAMF7 gene, wherein the target sequence is adjacent to a protospacer adjacent motif (PAM) sequence for the Cas9 protein. In some embodiments, the at least one guide RNA includes a crRNA sequence that is complementary to a target sequence in any one of exons of the SLAMF7 gene. In some embodiments, the at least one guide RNA includes a crRNA sequence that is complementary to a target sequence in one of exons disclosed herein of the SLAMF7 gene. In some embodiments, the at least one guide RNA has a crRNA sequence having at least 75% identity to a sequence selected from SEQ ID NOs: 4798-4822. In some embodiments, the at least one guide RNA has a crRNA sequence having at least 80% identity to a sequence selected from SEQ ID NOs: 4798-4822. In some embodiments, the at least one guide RNA has a crRNA sequence having at least 85% identity to a sequence selected from SEQ ID NOs: 4798-4822. In some embodiments, the at least one guide RNA has a crRNA sequence having at least 90% identity to a sequence selected from SEQ ID NOs: 4798-4822. In some embodiments, the at least one guide RNA has a crRNA sequence having at least 95% identity to a sequence selected from SEQ ID NOs: 4798-4822. In some embodiments, the at least one guide RNA has a crRNA sequence selected from SEQ ID NOs: 4798-4822. In some embodiments, the joint disease or condition is arthritis, e.g., osteoarthritis. In some embodiments, the administering includes intra-articular injection of the pharmaceutical composition into the joint of the subject.

[0646] In some embodiments, the present disclosure provides a pharmaceutical composition for the treatment or prevention of a joint disease or condition, the composition including a therapeutically effective amount of one or more nucleic acids encoding a Clustered Regularly Interspaced Short Palindromic Repeats (CRISPR) gene-editing system. The system includes a CRISPR Associated Protein 9 (Cas9) protein, and at least one guide RNA targeting an SLC41A1 gene, wherein the target sequence is adjacent to a protospacer adjacent motif (PAM) sequence for the Cas9 protein. In some embodiments, the at least one guide RNA includes a crRNA sequence that is complementary to a target sequence in any one of exons of the SLC41A1 gene. In some embodiments, the at least one guide RNA includes a crRNA sequence that is complementary to a target sequence in one of exons disclosed herein of the SLC41A1 gene. In some embodiments, the at least one guide RNA has a crRNA sequence having at least 75% identity to a sequence selected from SEQ ID NOs: 4823-4847. In some embodiments, the at least one guide RNA has a crRNA sequence having at least 80% identity to a sequence selected from SEQ ID NOs: 4823-4847. In some embodiments, the at least one guide RNA has a crRNA sequence having at least 85% identity to a sequence selected from SEQ ID NOs: 4823-4847. In some embodiments, the at least one guide RNA has a crRNA sequence having at least 90% identity to a sequence selected from SEQ ID NOs: 4823-4847. In some embodiments, the at least one guide RNA has a crRNA sequence having at least 95% identity to a sequence selected from SEQ ID NOs: 4823-4847. In some embodiments, the at least one guide RNA has a crRNA sequence selected from SEQ ID NOs: 4823-4847.

[0647] In some embodiments, the present disclosure provides method for the treatment or prevention of a joint disease or condition in a subject in need thereof. The method includes administering, to a joint of the subject, a pharmaceutical composition including a pharmaceutically effective amount of a composition having one or more nucleic acids encoding a Clustered Regularly Interspaced Short Palindromic Repeats (CRISPR) gene-editing system. The system includes a CRISPR Associated Protein 9 (Cas9) protein, and at least one guide RNA targeting an SLC41A1 gene, wherein the target sequence is adjacent to a protospacer adjacent motif (PAM) sequence for the Cas9 protein. In some embodiments, the at least one guide RNA includes a crRNA sequence that is complementary to a target sequence in any one of exons of the SLC41A1 gene. In some embodiments, the at least one guide RNA includes a crRNA sequence that is complementary to a target sequence in one of exons disclosed herein of the SLC41A1 gene. In some embodiments, the at least one guide RNA has a crRNA sequence having at least 75% identity to a sequence selected from SEQ ID NOs: 4823-4847. In some embodiments, the at least one guide RNA has a crRNA sequence having at least 80% identity to a sequence selected from SEQ ID NOs: 4823-4847. In some embodiments, the at least one guide RNA has a crRNA sequence having at least 85% identity to a sequence selected from SEQ ID NOs: 4823-4847. In some embodiments, the at least one guide RNA has a crRNA sequence having at least 90% identity to a sequence selected from SEQ ID NOs: 4823-4847. In some embodiments, the at least one guide RNA has a crRNA sequence having at least 95% identity to a sequence selected from SEQ ID NOs: 4823-4847. In some embodiments, the at least one guide RNA has a crRNA sequence selected from SEQ ID NOs: 4823-4847. In some embodiments, the joint disease or condition is arthritis, e.g., osteoarthritis. In some embodiments, the administering includes intra-articular injection of the pharmaceutical composition into the joint of the subject.

[0648] In some embodiments, the present disclosure provides a pharmaceutical composition for the treatment or prevention of a joint disease or condition, the composition including a therapeutically effective amount of one or more nucleic acids encoding a Clustered Regularly Interspaced Short Palindromic Repeats (CRISPR) gene-editing system. The system includes a CRISPR Associated Protein 9 (Cas9) protein, and at least one guide RNA targeting an SLC8A1 gene, wherein the target sequence is adjacent to a protospacer adjacent motif (PAM) sequence for the Cas9 protein. In some embodiments, the at least one guide RNA includes a crRNA sequence that is complementary to a target sequence in any one of exons of the SLC8A1 gene. In some embodiments, the at least one guide RNA includes a crRNA sequence that is complementary to a target sequence in one of exons disclosed herein of the SLC8A1 gene. In some embodiments, the at least one guide RNA has a crRNA sequence having at least 75% identity to a sequence selected from SEQ ID NOs: 4848-4872. In some embodiments, the at least one guide RNA has a crRNA sequence having at least 80% identity to a sequence selected from SEQ ID NOs: 4848-4872. In some embodiments, the at least one guide RNA has a crRNA sequence having at least 85% identity to a sequence selected from SEQ ID NOs: 4848-4872. In some embodiments, the at least one guide RNA has a crRNA sequence having at least 90% identity to a sequence selected from SEQ ID NOs: 4848-4872. In some embodiments, the at least one guide RNA has a crRNA sequence having at least 95% identity to a sequence selected from SEQ ID NOs: 4848-4872. In some embodiments, the at least one guide RNA has a crRNA sequence selected from SEQ ID NOs: 4848-4872.

[0649] In some embodiments, the present disclosure provides method for the treatment or prevention of a joint disease or condition in a subject in need thereof. The method includes administering, to a joint of the subject, a pharmaceutical composition including a pharmaceutically effective amount of a composition having one or more nucleic acids encoding a Clustered Regularly Interspaced Short Palindromic Repeats (CRISPR) gene-editing system. The system includes a CRISPR Associated Protein 9 (Cas9) protein, and at least one guide RNA targeting an SLC8A1 gene, wherein the target sequence is adjacent to a protospacer adjacent motif (PAM) sequence for the Cas9 protein. In some embodiments, the at least one guide RNA includes a crRNA sequence that is complementary to a target sequence in any one of exons of the SLC8A1 gene. In some embodiments, the at least one guide RNA includes a crRNA sequence that is complementary to a target sequence in one of exons disclosed herein of the SLC8A1 gene. In some embodiments, the at least one guide RNA has a crRNA sequence having at least 75% identity to a sequence selected from SEQ ID NOs: 4848-4872. In some embodiments, the at least one guide RNA has a crRNA sequence having at least 80% identity to a sequence selected from SEQ ID NOs: 4848-4872. In some embodiments, the at least one guide RNA has a crRNA sequence having at least 85% identity to a sequence selected from SEQ ID NOs: 4848-4872. In some embodiments, the at least one guide RNA has a crRNA sequence having at least 90% identity to a sequence selected from SEQ ID NOs: 4848-4872. In some embodiments, the at least one guide RNA has a crRNA sequence having at least 95% identity to a sequence selected from SEQ ID NOs: 4848-4872. In some embodiments, the at least one guide RNA has a crRNA sequence selected from SEQ ID NOs: 4848-4872. In some embodiments, the joint disease or condition is arthritis, e.g., osteoarthritis. In some embodiments, the administering includes intra-articular injection of the pharmaceutical composition into the joint of the subject.

[0650] In some embodiments, the present disclosure provides a pharmaceutical composition for the treatment or prevention of a joint disease or condition, the composition including a therapeutically effective amount of one or more nucleic acids encoding a Clustered Regularly Interspaced Short Palindromic Repeats (CRISPR) gene-editing system. The system includes a CRISPR Associated Protein 9 (Cas9) protein, and at least one guide RNA targeting an SLCO3A1 gene, wherein the target sequence is adjacent to a protospacer adjacent motif (PAM) sequence for the Cas9 protein. In some embodiments, the at least one guide RNA includes a crRNA sequence that is complementary to a target sequence in any one of exons of the SLCO3A1 gene. In some embodiments, the at least one guide RNA includes a crRNA sequence that is complementary to a target sequence in one of exons disclosed herein of the SLCO3A1 gene. In some embodiments, the at least one guide RNA has a crRNA sequence having at least 75% identity to a sequence selected from SEQ ID NOs: 4873-4897. In some embodiments, the at least one guide RNA has a crRNA sequence having at least 80% identity to a sequence selected from SEQ ID NOs: 4873-4897. In some embodiments, the at least one guide RNA has a crRNA sequence having at least 85% identity to a sequence selected from SEQ ID NOs: 4873-4897. In some embodiments, the at least one guide RNA has a crRNA sequence having at least 90% identity to a sequence selected from SEQ ID NOs: 4873-4897. In some embodiments, the at least one guide RNA has a crRNA sequence having at least 95% identity to a sequence selected from SEQ ID NOs: 4873-4897. In some embodiments, the at least one guide RNA has a crRNA sequence selected from SEQ ID NOs: 4873-4897.

[0651] In some embodiments, the present disclosure provides method for the treatment or prevention of a joint disease or condition in a subject in need thereof. The method includes administering, to a joint of the subject, a pharmaceutical composition including a pharmaceutically effective amount of a composition having one or more nucleic acids encoding a Clustered Regularly Interspaced Short Palindromic Repeats (CRISPR) gene-editing system. The system includes a CRISPR Associated Protein 9 (Cas9) protein, and at least one guide RNA targeting an SLCO3A1 gene, wherein the target sequence is adjacent to a protospacer adjacent motif (PAM) sequence for the Cas9 protein. In some embodiments, the at least one guide RNA includes a crRNA sequence that is complementary to a target sequence in any one of exons of the SLCO3A1 gene. In some embodiments, the at least one guide RNA includes a crRNA sequence that is complementary to a target sequence in one of exons disclosed herein of the SLCO3A1 gene. In some embodiments, the at least one guide RNA has a crRNA sequence having at least 75% identity to a sequence selected from SEQ ID NOs: 4873-4897. In some embodiments, the at least one guide RNA has a crRNA sequence having at least 80% identity to a sequence selected from SEQ ID NOs: 4873-4897. In some embodiments, the at least one guide RNA has a crRNA sequence having at least 85% identity to a sequence selected from SEQ ID NOs: 4873-4897. In some embodiments, the at least one guide RNA has a crRNA sequence having at least 90% identity to a sequence selected from SEQ ID NOs: 4873-4897. In some embodiments, the at least one guide RNA has a crRNA sequence having at least 95% identity to a sequence selected from SEQ ID NOs: 4873-4897. In some embodiments, the at least one guide RNA has a crRNA sequence selected from SEQ ID NOs: 4873-4897. In some embodiments, the joint disease or condition is arthritis, e.g., osteoarthritis. In some embodiments, the administering includes intra-articular injection of the pharmaceutical composition into the joint of the subject.

[0652] In some embodiments, the present disclosure provides a pharmaceutical composition for the treatment or prevention of a joint disease or condition, the composition including a therapeutically effective amount of one or more nucleic acids encoding a Clustered Regularly Interspaced Short Palindromic Repeats (CRISPR) gene-editing system. The system includes a CRISPR Associated Protein 9 (Cas9) protein, and at least one guide RNA targeting an STAT1 gene, wherein the target sequence is adjacent to a protospacer adjacent motif (PAM) sequence for the Cas9 protein. In some embodiments, the at least one guide RNA includes a crRNA sequence that is complementary to a target sequence in any one of exons of the STAT1 gene. In some embodiments, the at least one guide RNA includes a crRNA sequence that is complementary to a target sequence in one of exons disclosed herein of the STAT1 gene. In some embodiments, the at least one guide RNA has a crRNA sequence having at least 75% identity to a sequence selected from SEQ ID NOs: 4898-4922. In some embodiments, the at least one guide RNA has a crRNA sequence having at least 80% identity to a sequence selected from SEQ ID NOs: 4898-4922. In some embodiments, the at least one guide RNA has a crRNA sequence having at least 85% identity to a sequence selected from SEQ ID NOs: 4898-4922. In some embodiments, the at least one guide RNA has a crRNA sequence having at least 90% identity to a sequence selected from SEQ ID NOs: 4898-4922. In some embodiments, the at least one guide RNA has a crRNA sequence having at least 95% identity to a sequence selected from SEQ ID NOs: 4898-4922. In some embodiments, the at least one guide RNA has a crRNA sequence selected from SEQ ID NOs: 4898-4922.

[0653] In some embodiments, the present disclosure provides method for the treatment or prevention of a joint disease or condition in a subject in need thereof. The method includes administering, to a joint of the subject, a pharmaceutical composition including a pharmaceutically effective amount of a composition having one or more nucleic acids encoding a Clustered Regularly Interspaced Short Palindromic Repeats (CRISPR) gene-editing system. The system includes a CRISPR Associated Protein 9 (Cas9) protein, and at least one guide RNA targeting an STAT1 gene, wherein the target sequence is adjacent to a protospacer adjacent motif (PAM) sequence for the Cas9 protein. In some embodiments, the at least one guide RNA includes a crRNA sequence that is complementary to a target sequence in any one of exons of the STAT1 gene. In some embodiments, the at least one guide RNA includes a crRNA sequence that is complementary to a target sequence in one of exons disclosed herein of the STAT1 gene. In some embodiments, the at least one guide RNA has a crRNA sequence having at least 75% identity to a sequence selected from SEQ ID NOs: 4898-4922. In some embodiments, the at least one guide RNA has a crRNA sequence having at least 80% identity to a sequence selected from SEQ ID NOs: 4898-4922. In some embodiments, the at least one guide RNA has a crRNA sequence having at least 85% identity to a sequence selected from SEQ ID NOs: 4898-4922. In some embodiments, the at least one guide RNA has a crRNA sequence having at least 90% identity to a sequence selected from SEQ ID NOs: 4898-4922. In some embodiments, the at least one guide RNA has a crRNA sequence having at least 95% identity to a sequence selected from SEQ ID NOs: 4898-4922. In some embodiments, the at least one guide RNA has a crRNA sequence selected from SEQ ID NOs: 4898-4922. In some embodiments, the joint disease or condition is arthritis, e.g., osteoarthritis. In some embodiments, the administering includes intra-articular injection of the pharmaceutical composition into the joint of the subject.

[0654] In some embodiments, the present disclosure provides a pharmaceutical composition for the treatment or prevention of a joint disease or condition, the composition including a therapeutically effective amount of one or more nucleic acids encoding a Clustered Regularly Interspaced Short Palindromic Repeats (CRISPR) gene-editing system. The system includes a CRISPR Associated Protein 9 (Cas9) protein, and at least one guide RNA targeting an BST2 gene, wherein the target sequence is adjacent to a protospacer adjacent motif (PAM) sequence for the Cas9 protein. In some embodiments, the at least one guide RNA includes a crRNA sequence that is complementary to a target sequence in any one of exons of the BST2 gene. In some embodiments, the at least one guide RNA includes a crRNA sequence that is complementary to a target sequence in one of exons disclosed herein of the BST2 gene. In some embodiments, the at least one guide RNA has a crRNA sequence having at least 75% identity to a sequence selected from SEQ ID NOs: 4923-4947. In some embodiments, the at least one guide RNA has a crRNA sequence having at least 80% identity to a sequence selected from SEQ ID NOs: 4923-4947. In some embodiments, the at least one guide RNA has a crRNA sequence having at least 85% identity to a sequence selected from SEQ ID NOs: 4923-4947. In some embodiments, the at least one guide RNA has a crRNA sequence having at least 90% identity to a sequence selected from SEQ ID NOs: 4923-4947. In some embodiments, the at least one guide RNA has a crRNA sequence having at least 95% identity to a sequence selected from SEQ ID NOs: 4923-4947. In some embodiments, the at least one guide RNA has a crRNA sequence selected from SEQ ID NOs: 4923-4947.

[0655] In some embodiments, the present disclosure provides method for the treatment or prevention of a joint disease or condition in a subject in need thereof. The method includes administering, to a joint of the subject, a pharmaceutical composition including a pharmaceutically effective amount of a composition having one or more nucleic acids encoding a Clustered Regularly Interspaced Short Palindromic Repeats (CRISPR) gene-editing system. The system includes a CRISPR Associated Protein 9 (Cas9) protein, and at least one guide RNA targeting an BST2 gene, wherein the target sequence is adjacent to a protospacer adjacent motif (PAM) sequence for the Cas9 protein. In some embodiments, the at least one guide RNA includes a crRNA sequence that is complementary to a target sequence in any one of exons of the BST2 gene. In some embodiments, the at least one guide RNA includes a crRNA sequence that is complementary to a target sequence in one of exons disclosed herein of the BST2 gene. In some embodiments, the at least one guide RNA has a crRNA sequence having at least 75% identity to a sequence selected from SEQ ID NOs: 4923-4947. In some embodiments, the at least one guide RNA has a crRNA sequence having at least 80% identity to a sequence selected from SEQ ID NOs: 4923-4947. In some embodiments, the at least one guide RNA has a crRNA sequence having at least 85% identity to a sequence selected from SEQ ID NOs: 4923-4947. In some embodiments, the at least one guide RNA has a crRNA sequence having at least 90% identity to a sequence selected from SEQ ID NOs: 4923-4947. In some embodiments, the at least one guide RNA has a crRNA sequence having at least 95% identity to a sequence selected from SEQ ID NOs: 4923-4947. In some embodiments, the at least one guide RNA has a crRNA sequence selected from SEQ ID NOs: 4923-4947. In some embodiments, the joint disease or condition is arthritis, e.g., osteoarthritis. In some embodiments, the administering includes intra-articular injection of the pharmaceutical composition into the joint of the subject.

[0656] In some embodiments, the present disclosure provides a pharmaceutical composition for the treatment or prevention of a joint disease or condition, the composition including a therapeutically effective amount of one or more nucleic acids encoding a Clustered Regularly Interspaced Short Palindromic Repeats (CRISPR) gene-editing system. The system includes a CRISPR Associated Protein 9 (Cas9) protein, and at least one guide RNA targeting an TLR5 gene, wherein the target sequence is adjacent to a protospacer adjacent motif (PAM) sequence for the Cas9 protein. In some embodiments, the at least one guide RNA includes a crRNA sequence that is complementary to a target sequence in any one of exons of the TLR5 gene. In some embodiments, the at least one guide RNA includes a crRNA sequence that is complementary to a target sequence in one of exons disclosed herein of the TLR5 gene. In some embodiments, the at least one guide RNA has a crRNA sequence having at least 75% identity to a sequence selected from SEQ ID NOs: 4948-4972. In some embodiments, the at least one guide RNA has a crRNA sequence having at least 80% identity to a sequence selected from SEQ ID NOs: 4948-4972. In some embodiments, the at least one guide RNA has a crRNA sequence having at least 85% identity to a sequence selected from SEQ ID NOs: 4948-4972. In some embodiments, the at least one guide RNA has a crRNA sequence having at least 90% identity to a sequence selected from SEQ ID NOs: 4948-4972. In some embodiments, the at least one guide RNA has a crRNA sequence having at least 95% identity to a sequence selected from SEQ ID NOs: 4948-4972. In some embodiments, the at least one guide RNA has a crRNA sequence selected from SEQ ID NOs: 4948-4972.

[0657] In some embodiments, the present disclosure provides method for the treatment or prevention of a joint disease or condition in a subject in need thereof. The method includes administering, to a joint of the subject, a pharmaceutical composition including a pharmaceutically effective amount of a composition having one or more nucleic acids encoding a Clustered Regularly Interspaced Short Palindromic Repeats (CRISPR) gene-editing system. The system includes a CRISPR Associated Protein 9 (Cas9) protein, and at least one guide RNA targeting an TLR5 gene, wherein the target sequence is adjacent to a protospacer adjacent motif (PAM) sequence for the Cas9 protein. In some embodiments, the at least one guide RNA includes a crRNA sequence that is complementary to a target sequence in any one of exons of the TLR5 gene. In some embodiments, the at least one guide RNA includes a crRNA sequence that is complementary to a target sequence in one of exons disclosed herein of the TLR5 gene. In some embodiments, the at least one guide RNA has a crRNA sequence having at least 75% identity to a sequence selected from SEQ ID NOs: 4948-4972. In some embodiments, the at least one guide RNA has a crRNA sequence having at least 80% identity to a sequence selected from SEQ ID NOs: 4948-4972. In some embodiments, the at least one guide RNA has a crRNA sequence having at least 85% identity to a sequence selected from SEQ ID NOs: 4948-4972. In some embodiments, the at least one guide RNA has a crRNA sequence having at least 90% identity to a sequence selected from SEQ ID NOs: 4948-4972. In some embodiments, the at least one guide RNA has a crRNA sequence having at least 95% identity to a sequence selected from SEQ ID NOs: 4948-4972. In some embodiments, the at least one guide RNA has a crRNA sequence selected from SEQ ID NOs: 4948-4972. In some embodiments, the joint disease or condition is arthritis, e.g., osteoarthritis. In some embodiments, the administering includes intra-articular injection of the pharmaceutical composition into the joint of the subject.

[0658] In some embodiments, the present disclosure provides a pharmaceutical composition for the treatment or prevention of a joint disease or condition, the composition including a therapeutically effective amount of one or more nucleic acids encoding a Clustered Regularly Interspaced Short Palindromic Repeats (CRISPR) gene-editing system. The system includes a CRISPR Associated Protein 9 (Cas9) protein, and at least one guide RNA targeting an TLR7 gene, wherein the target sequence is adjacent to a protospacer adjacent motif (PAM) sequence for the Cas9 protein. In some embodiments, the at least one guide RNA includes a crRNA sequence that is complementary to a target sequence in any one of exons of the TLR7 gene. In some embodiments, the at least one guide RNA includes a crRNA sequence that is complementary to a target sequence in one of exons disclosed herein of the TLR7 gene. In some embodiments, the at least one guide RNA has a crRNA sequence having at least 75% identity to a sequence selected from SEQ ID NOs: 4973-4997. In some embodiments, the at least one guide RNA has a crRNA sequence having at least 80% identity to a sequence selected from SEQ ID NOs: 4973-4997. In some embodiments, the at least one guide RNA has a crRNA sequence having at least 85% identity to a sequence selected from SEQ ID NOs: 4973-4997. In some embodiments, the at least one guide RNA has a crRNA sequence having at least 90% identity to a sequence selected from SEQ ID NOs: 4973-4997. In some embodiments, the at least one guide RNA has a crRNA sequence having at least 95% identity to a sequence selected from SEQ ID NOs: 4973-4997. In some embodiments, the at least one guide RNA has a crRNA sequence selected from SEQ ID NOs: 4973-4997.

[0659] In some embodiments, the present disclosure provides method for the treatment or prevention of a joint disease or condition in a subject in need thereof. The method includes administering, to a joint of the subject, a pharmaceutical composition including a pharmaceutically effective amount of a composition having one or more nucleic acids encoding a Clustered Regularly Interspaced Short Palindromic Repeats (CRISPR) gene-editing system. The system includes a CRISPR Associated Protein 9 (Cas9) protein, and at least one guide RNA targeting an TLR7 gene, wherein the target sequence is adjacent to a protospacer adjacent motif (PAM) sequence for the Cas9 protein. In some embodiments, the at least one guide RNA includes a crRNA sequence that is complementary to a target sequence in any one of exons of the TLR7 gene. In some embodiments, the at least one guide RNA includes a crRNA sequence that is complementary to a target sequence in one of exons disclosed herein of the TLR7 gene. In some embodiments, the at least one guide RNA has a crRNA sequence having at least 75% identity to a sequence selected from SEQ ID NOs: 4973-4997. In some embodiments, the at least one guide RNA has a crRNA sequence having at least 80% identity to a sequence selected from SEQ ID NOs: 4973-4997. In some embodiments, the at least one guide RNA has a crRNA sequence having at least 85% identity to a sequence selected from SEQ ID NOs: 4973-4997. In some embodiments, the at least one guide RNA has a crRNA sequence having at least 90% identity to a sequence selected from SEQ ID NOs: 4973-4997. In some embodiments, the at least one guide RNA has a crRNA sequence having at least 95% identity to a sequence selected from SEQ ID NOs: 4973-4997. In some embodiments, the at least one guide RNA has a crRNA sequence selected from SEQ ID NOs: 4973-4997. In some embodiments, the joint disease or condition is arthritis, e.g., osteoarthritis. In some embodiments, the administering includes intra-articular injection of the pharmaceutical composition into the joint of the subject.

[0660] In some embodiments, the present disclosure provides a pharmaceutical composition for the treatment or prevention of a joint disease or condition, the composition including a therapeutically effective amount of one or more nucleic acids encoding a Clustered Regularly Interspaced Short Palindromic Repeats (CRISPR) gene-editing system. The system includes a CRISPR Associated Protein 9 (Cas9) protein, and at least one guide RNA targeting an TLR9 gene, wherein the target sequence is adjacent to a protospacer adjacent motif (PAM) sequence for the Cas9 protein. In some embodiments, the at least one guide RNA includes a crRNA sequence that is complementary to a target sequence in any one of exons of the TLR9 gene. In some embodiments, the at least one guide RNA includes a crRNA sequence that is complementary to a target sequence in one of exons disclosed herein of the TLR9 gene. In some embodiments, the at least one guide RNA has a crRNA sequence having at least 75% identity to a sequence selected from SEQ ID NOs: 4998-5022. In some embodiments, the at least one guide RNA has a crRNA sequence having at least 80% identity to a sequence selected from SEQ ID NOs: 4998-5022. In some embodiments, the at least one guide RNA has a crRNA sequence having at least 85% identity to a sequence selected from SEQ ID NOs: 4998-5022. In some embodiments, the at least one guide RNA has a crRNA sequence having at least 90% identity to a sequence selected from SEQ ID NOs: 4998-5022. In some embodiments, the at least one guide RNA has a crRNA sequence having at least 95% identity to a sequence selected from SEQ ID NOs: 4998-5022. In some embodiments, the at least one guide RNA has a crRNA sequence selected from SEQ ID NOs: 4998-5022.

[0661] In some embodiments, the present disclosure provides method for the treatment or prevention of a joint disease or condition in a subject in need thereof. The method includes administering, to a joint of the subject, a pharmaceutical composition including a pharmaceutically effective amount of a composition having one or more nucleic acids encoding a Clustered Regularly Interspaced Short Palindromic Repeats (CRISPR) gene-editing system. The system includes a CRISPR Associated Protein 9 (Cas9) protein, and at least one guide RNA targeting an TLR9 gene, wherein the target sequence is adjacent to a protospacer adjacent motif (PAM) sequence for the Cas9 protein. In some embodiments, the at least one guide RNA includes a crRNA sequence that is complementary to a target sequence in any one of exons of the TLR9 gene. In some embodiments, the at least one guide RNA includes a crRNA sequence that is complementary to a target sequence in one of exons disclosed herein of the TLR9 gene. In some embodiments, the at least one guide RNA has a crRNA sequence having at least 75% identity to a sequence selected from SEQ ID NOs: 4998-5022. In some embodiments, the at least one guide RNA has a crRNA sequence having at least 80% identity to a sequence selected from SEQ ID NOs: 4998-5022. In some embodiments, the at least one guide RNA has a crRNA sequence having at least 85% identity to a sequence selected from SEQ ID NOs: 4998-5022. In some embodiments, the at least one guide RNA has a crRNA sequence having at least 90% identity to a sequence selected from SEQ ID NOs: 4998-5022. In some embodiments, the at least one guide RNA has a crRNA sequence having at least 95% identity to a sequence selected from SEQ ID NOs: 4998-5022. In some embodiments, the at least one guide RNA has a crRNA sequence selected from SEQ ID NOs: 4998-5022. In some embodiments, the joint disease or condition is arthritis, e.g., osteoarthritis. In some embodiments, the administering includes intra-articular injection of the pharmaceutical composition into the joint of the subject.

[0662] In some embodiments, the present disclosure provides a pharmaceutical composition for the treatment or prevention of a joint disease or condition, the composition including a therapeutically effective amount of one or more nucleic acids encoding a Clustered Regularly Interspaced Short Palindromic Repeats (CRISPR) gene-editing system. The system includes a CRISPR Associated Protein 9 (Cas9) protein, and at least one guide RNA targeting an TREM2 gene, wherein the target sequence is adjacent to a protospacer adjacent motif (PAM) sequence for the Cas9 protein. In some embodiments, the at least one guide RNA includes a crRNA sequence that is complementary to a target sequence in any one of exons of the TREM2 gene. In some embodiments, the at least one guide RNA includes a crRNA sequence that is complementary to a target sequence in one of exons disclosed herein of the TREM2 gene. In some embodiments, the at least one guide RNA has a crRNA sequence having at least 75% identity to a sequence selected from SEQ ID NOs: 5023-5047. In some embodiments, the at least one guide RNA has a crRNA sequence having at least 80% identity to a sequence selected from SEQ ID NOs: 5023-5047. In some embodiments, the at least one guide RNA has a crRNA sequence having at least 85% identity to a sequence selected from SEQ ID NOs: 5023-5047. In some embodiments, the at least one guide RNA has a crRNA sequence having at least 90% identity to a sequence selected from SEQ ID NOs: 5023-5047. In some embodiments, the at least one guide RNA has a crRNA sequence having at least 95% identity to a sequence selected from SEQ ID NOs: 5023-5047. In some embodiments, the at least one guide RNA has a crRNA sequence selected from SEQ ID NOs: 5023-5047.

[0663] In some embodiments, the present disclosure provides method for the treatment or prevention of a joint disease or condition in a subject in need thereof. The method includes administering, to a joint of the subject, a pharmaceutical composition including a pharmaceutically effective amount of a composition having one or more nucleic acids encoding a Clustered Regularly Interspaced Short Palindromic Repeats (CRISPR) gene-editing system. The system includes a CRISPR Associated Protein 9 (Cas9) protein, and at least one guide RNA targeting an TREM2 gene, wherein the target sequence is adjacent to a protospacer adjacent motif (PAM) sequence for the Cas9 protein. In some embodiments, the at least one guide RNA includes a crRNA sequence that is complementary to a target sequence in any one of exons of the TREM2 gene. In some embodiments, the at least one guide RNA includes a crRNA sequence that is complementary to a target sequence in one of exons disclosed herein of the TREM2 gene. In some embodiments, the at least one guide RNA has a crRNA sequence having at least 75% identity to a sequence selected from SEQ ID NOs: 5023-5047. In some embodiments, the at least one guide RNA has a crRNA sequence having at least 80% identity to a sequence selected from SEQ ID NOs: 5023-5047. In some embodiments, the at least one guide RNA has a crRNA sequence having at least 85% identity to a sequence selected from SEQ ID NOs: 5023-5047. In some embodiments, the at least one guide RNA has a crRNA sequence having at least 90% identity to a sequence selected from SEQ ID NOs: 5023-5047. In some embodiments, the at least one guide RNA has a crRNA sequence having at least 95% identity to a sequence selected from SEQ ID NOs: 5023-5047. In some embodiments, the at least one guide RNA has a crRNA sequence selected from SEQ ID NOs: 5023-5047. In some embodiments, the joint disease or condition is arthritis, e.g., osteoarthritis. In some embodiments, the administering includes intra-articular injection of the pharmaceutical composition into the joint of the subject.

[0664] In some embodiments, the present disclosure provides a pharmaceutical composition for the treatment or prevention of a joint disease or condition, the composition including a therapeutically effective amount of one or more nucleic acids encoding a Clustered Regularly Interspaced Short Palindromic Repeats (CRISPR) gene-editing system. The system includes a CRISPR Associated Protein 9 (Cas9) protein, and at least one guide RNA targeting an TREX1 gene, wherein the target sequence is adjacent to a protospacer adjacent motif (PAM) sequence for the Cas9 protein. In some embodiments, the at least one guide RNA includes a crRNA sequence that is complementary to a target sequence in any one of exons of the TREX1 gene. In some embodiments, the at least one guide RNA includes a crRNA sequence that is complementary to a target sequence in one of exons disclosed herein of the TREX1 gene. In some embodiments, the at least one guide RNA has a crRNA sequence having at least 75% identity to a sequence selected from SEQ ID NOs: 5048-5072. In some embodiments, the at least one guide RNA has a crRNA sequence having at least 80% identity to a sequence selected from SEQ ID NOs: 5048-5072. In some embodiments, the at least one guide RNA has a crRNA sequence having at least 85% identity to a sequence selected from SEQ ID NOs: 5048-5072. In some embodiments, the at least one guide RNA has a crRNA sequence having at least 90% identity to a sequence selected from SEQ ID NOs: 5048-5072. In some embodiments, the at least one guide RNA has a crRNA sequence having at least 95% identity to a sequence selected from SEQ ID NOs: 5048-5072. In some embodiments, the at least one guide RNA has a crRNA sequence selected from SEQ ID NOs: 5048-5072.

[0665] In some embodiments, the present disclosure provides method for the treatment or prevention of a joint disease or condition in a subject in need thereof. The method includes administering, to a joint of the subject, a pharmaceutical composition including a pharmaceutically effective amount of a composition having one or more nucleic acids encoding a Clustered Regularly Interspaced Short Palindromic Repeats (CRISPR) gene-editing system. The system includes a CRISPR Associated Protein 9 (Cas9) protein, and at least one guide RNA targeting an TREX1 gene, wherein the target sequence is adjacent to a protospacer adjacent motif (PAM) sequence for the Cas9 protein. In some embodiments, the at least one guide RNA includes a crRNA sequence that is complementary to a target sequence in any one of exons of the TREX1 gene. In some embodiments, the at least one guide RNA includes a crRNA sequence that is complementary to a target sequence in one of exons disclosed herein of the TREX1 gene. In some embodiments, the at least one guide RNA has a crRNA sequence having at least 75% identity to a sequence selected from SEQ ID NOs: 5048-5072. In some embodiments, the at least one guide RNA has a crRNA sequence having at least 80% identity to a sequence selected from SEQ ID NOs: 5048-5072. In some embodiments, the at least one guide RNA has a crRNA sequence having at least 85% identity to a sequence selected from SEQ ID NOs: 5048-5072. In some embodiments, the at least one guide RNA has a crRNA sequence having at least 90% identity to a sequence selected from SEQ ID NOs: 5048-5072. In some embodiments, the at least one guide RNA has a crRNA sequence having at least 95% identity to a sequence selected from SEQ ID NOs: 5048-5072. In some embodiments, the at least one guide RNA has a crRNA sequence selected from SEQ ID NOs: 5048-5072. In some embodiments, the joint disease or condition is arthritis, e.g., osteoarthritis. In some embodiments, the administering includes intra-articular injection of the pharmaceutical composition into the joint of the subject.

[0666] In some embodiments, the present disclosure provides a pharmaceutical composition for the treatment or prevention of a joint disease or condition, the composition including a therapeutically effective amount of one or more nucleic acids encoding a Clustered Regularly Interspaced Short Palindromic Repeats (CRISPR) gene-editing system. The system includes a CRISPR Associated Protein 9 (Cas9) protein, and at least one guide RNA targeting an TRIM5 gene, wherein the target sequence is adjacent to a protospacer adjacent motif (PAM) sequence for the Cas9 protein. In some embodiments, the at least one guide RNA includes a crRNA sequence that is complementary to a target sequence in any one of exons of the TRIM5 gene. In some embodiments, the at least one guide RNA includes a crRNA sequence that is complementary to a target sequence in one of exons disclosed herein of the TRIM5 gene. In some embodiments, the at least one guide RNA has a crRNA sequence having at least 75% identity to a sequence selected from SEQ ID NOs: 5073-5097. In some embodiments, the at least one guide RNA has a crRNA sequence having at least 80% identity to a sequence selected from SEQ ID NOs: 5073-5097. In some embodiments, the at least one guide RNA has a crRNA sequence having at least 85% identity to a sequence selected from SEQ ID NOs: 5073-5097. In some embodiments, the at least one guide RNA has a crRNA sequence having at least 90% identity to a sequence selected from SEQ ID NOs: 5073-5097. In some embodiments, the at least one guide RNA has a crRNA sequence having at least 95% identity to a sequence selected from SEQ ID NOs: 5073-5097. In some embodiments, the at least one guide RNA has a crRNA sequence selected from SEQ ID NOs: 5073-5097.

[0667] In some embodiments, the present disclosure provides method for the treatment or prevention of a joint disease or condition in a subject in need thereof. The method includes administering, to a joint of the subject, a pharmaceutical composition including a pharmaceutically effective amount of a composition having one or more nucleic acids encoding a Clustered Regularly Interspaced Short Palindromic Repeats (CRISPR) gene-editing system. The system includes a CRISPR Associated Protein 9 (Cas9) protein, and at least one guide RNA targeting an TRIM5 gene, wherein the target sequence is adjacent to a protospacer adjacent motif (PAM) sequence for the Cas9 protein. In some embodiments, the at least one guide RNA includes a crRNA sequence that is complementary to a target sequence in any one of exons of the TRIM5 gene. In some embodiments, the at least one guide RNA includes a crRNA sequence that is complementary to a target sequence in one of exons disclosed herein of the TRIM5 gene. In some embodiments, the at least one guide RNA has a crRNA sequence having at least 75% identity to a sequence selected from SEQ ID NOs: 5073-5097. In some embodiments, the at least one guide RNA has a crRNA sequence having at least 80% identity to a sequence selected from SEQ ID NOs: 5073-5097. In some embodiments, the at least one guide RNA has a crRNA sequence having at least 85% identity to a sequence selected from SEQ ID NOs: 5073-5097. In some embodiments, the at least one guide RNA has a crRNA sequence having at least 90% identity to a sequence selected from SEQ ID NOs: 5073-5097. In some embodiments, the at least one guide RNA has a crRNA sequence having at least 95% identity to a sequence selected from SEQ ID NOs: 5073-5097. In some embodiments, the at least one guide RNA has a crRNA sequence selected from SEQ ID NOs: 5073-5097. In some embodiments, the joint disease or condition is arthritis, e.g., osteoarthritis. In some embodiments, the administering includes intra-articular injection of the pharmaceutical composition into the joint of the subject.

[0668] In some embodiments, the present disclosure provides a pharmaceutical composition for the treatment or prevention of a joint disease or condition, the composition including a therapeutically effective amount of one or more nucleic acids encoding a Clustered Regularly Interspaced Short Palindromic Repeats (CRISPR) gene-editing system. The system includes a CRISPR Associated Protein 9 (Cas9) protein, and at least one guide RNA targeting an TTLL7 gene, wherein the target sequence is adjacent to a protospacer adjacent motif (PAM) sequence for the Cas9 protein. In some embodiments, the at least one guide RNA includes a crRNA sequence that is complementary to a target sequence in any one of exons of the TTLL7 gene. In some embodiments, the at least one guide RNA includes a crRNA sequence that is complementary to a target sequence in one of exons disclosed herein of the TTLL7 gene. In some embodiments, the at least one guide RNA has a crRNA sequence having at least 75% identity to a sequence selected from SEQ ID NOs: 5098-5122. In some embodiments, the at least one guide RNA has a crRNA sequence having at least 80% identity to a sequence selected from SEQ ID NOs: 5098-5122. In some embodiments, the at least one guide RNA has a crRNA sequence having at least 85% identity to a sequence selected from SEQ ID NOs: 5098-5122. In some embodiments, the at least one guide RNA has a crRNA sequence having at least 90% identity to a sequence selected from SEQ ID NOs: 5098-5122. In some embodiments, the at least one guide RNA has a crRNA sequence having at least 95% identity to a sequence selected from SEQ ID NOs: 5098-5122. In some embodiments, the at least one guide RNA has a crRNA sequence selected from SEQ ID NOs: 5098-5122.

[0669] In some embodiments, the present disclosure provides method for the treatment or prevention of a joint disease or condition in a subject in need thereof. The method includes administering, to a joint of the subject, a pharmaceutical composition including a pharmaceutically effective amount of a composition having one or more nucleic acids encoding a Clustered Regularly Interspaced Short Palindromic Repeats (CRISPR) gene-editing system. The system includes a CRISPR Associated Protein 9 (Cas9) protein, and at least one guide RNA targeting an TTLL7 gene, wherein the target sequence is adjacent to a protospacer adjacent motif (PAM) sequence for the Cas9 protein. In some embodiments, the at least one guide RNA includes a crRNA sequence that is complementary to a target sequence in any one of exons of the TTLL7 gene. In some embodiments, the at least one guide RNA includes a crRNA sequence that is complementary to a target sequence in one of exons disclosed herein of the TTLL7 gene. In some embodiments, the at least one guide RNA has a crRNA sequence having at least 75% identity to a sequence selected from SEQ ID NOs: 5098-5122. In some embodiments, the at least one guide RNA has a crRNA sequence having at least 80% identity to a sequence selected from SEQ ID NOs: 5098-5122. In some embodiments, the at least one guide RNA has a crRNA sequence having at least 85% identity to a sequence selected from SEQ ID NOs: 5098-5122. In some embodiments, the at least one guide RNA has a crRNA sequence having at least 90% identity to a sequence selected from SEQ ID NOs: 5098-5122. In some embodiments, the at least one guide RNA has a crRNA sequence having at least 95% identity to a sequence selected from SEQ ID NOs: 5098-5122. In some embodiments, the at least one guide RNA has a crRNA sequence selected from SEQ ID NOs: 5098-5122. In some embodiments, the joint disease or condition is arthritis, e.g., osteoarthritis. In some embodiments, the administering includes intra-articular injection of the pharmaceutical composition into the joint of the subject.

[0670] In some embodiments, the present disclosure provides a pharmaceutical composition for the treatment or prevention of a joint disease or condition, the composition including a therapeutically effective amount of one or more nucleic acids encoding a Clustered Regularly Interspaced Short Palindromic Repeats (CRISPR) gene-editing system. The system includes a CRISPR Associated Protein 9 (Cas9) protein, and at least one guide RNA targeting an TYROBP gene, wherein the target sequence is adjacent to a protospacer adjacent motif (PAM) sequence for the Cas9 protein. In some embodiments, the at least one guide RNA includes a crRNA sequence that is complementary to a target sequence in any one of exons of the TYROBP gene. In some embodiments, the at least one guide RNA includes a crRNA sequence that is complementary to a target sequence in one of exons disclosed herein of the TYROBP gene. In some embodiments, the at least one guide RNA has a crRNA sequence having at least 75% identity to a sequence selected from SEQ ID NOs: 5123-5147. In some embodiments, the at least one guide RNA has a crRNA sequence having at least 80% identity to a sequence selected from SEQ ID NOs: 5123-5147. In some embodiments, the at least one guide RNA has a crRNA sequence having at least 85% identity to a sequence selected from SEQ ID NOs: 5123-5147. In some embodiments, the at least one guide RNA has a crRNA sequence having at least 90% identity to a sequence selected from SEQ ID NOs: 5123-5147. In some embodiments, the at least one guide RNA has a crRNA sequence having at least 95% identity to a sequence selected from SEQ ID NOs: 5123-5147. In some embodiments, the at least one guide RNA has a crRNA sequence selected from SEQ ID NOs: 5123-5147.

[0671] In some embodiments, the present disclosure provides method for the treatment or prevention of a joint disease or condition in a subject in need thereof. The method includes administering, to a joint of the subject, a pharmaceutical composition including a pharmaceutically effective amount of a composition having one or more nucleic acids encoding a Clustered Regularly Interspaced Short Palindromic Repeats (CRISPR) gene-editing system. The system includes a CRISPR Associated Protein 9 (Cas9) protein, and at least one guide RNA targeting an TYROBP gene, wherein the target sequence is adjacent to a protospacer adjacent motif (PAM) sequence for the Cas9 protein. In some embodiments, the at least one guide RNA includes a crRNA sequence that is complementary to a target sequence in any one of exons of the TYROBP gene. In some embodiments, the at least one guide RNA includes a crRNA sequence that is complementary to a target sequence in one of exons disclosed herein of the TYROBP gene. In some embodiments, the at least one guide RNA has a crRNA sequence having at least 75% identity to a sequence selected from SEQ ID NOs: 5123-5147. In some embodiments, the at least one guide RNA has a crRNA sequence having at least 80% identity to a sequence selected from SEQ ID NOs: 5123-5147. In some embodiments, the at least one guide RNA has a crRNA sequence having at least 85% identity to a sequence selected from SEQ ID NOs: 5123-5147. In some embodiments, the at least one guide RNA has a crRNA sequence having at least 90% identity to a sequence selected from SEQ ID NOs: 5123-5147. In some embodiments, the at least one guide RNA has a crRNA sequence having at least 95% identity to a sequence selected from SEQ ID NOs: 5123-5147. In some embodiments, the at least one guide RNA has a crRNA sequence selected from SEQ ID NOs: 5123-5147. In some embodiments, the joint disease or condition is arthritis, e.g., osteoarthritis. In some embodiments, the administering includes intra-articular injection of the pharmaceutical composition into the joint of the subject.

[0672] In some embodiments, the joint disease or condition is arthritis. In some embodiments, the arthritis is osteoarthritis.

[0673] In some embodiments, the administering includes intra-articular injection of the pharmaceutical composition into the joint of the subject. In some embodiments, the pharmaceutical composition is administered during surgery. In some embodiments, the pharmaceutical composition is administered after surgery. In some embodiments, the pharmaceutical composition is a controlled release pharmaceutical composition.

[0674] In some embodiments, the pharmaceutical composition includes one or more viral vectors, as described herein, collectively comprising the one or more nucleic acids. In some embodiments, the one or more viral vectors include a recombinant virus selected from a retrovirus, an adenovirus, an adeno-associated virus, a lentivirus, and a herpes simplex virus-1. In some embodiments, the one of more viral vectors include a recombinant adeno-associated virus (AAV). In some embodiments, the recombinant AAV is of serotype 5 (AAV5). In some embodiments, the recombinant AAV is of serotype 6 (AAV6).

[0675] In some embodiments, the one of more viral vectors include a first viral vector comprising a first nucleic acid, in the one or more nucleic acids, encoding the Cas9 protein, and a second viral vector comprising a second nucleic acid, in the one or more nucleic acids, encoding the at least one guide RNA. In some embodiments, the one of more viral vectors comprise a viral vector comprising a single nucleic acid, wherein the single nucleic acid encodes the Cas9 protein and the at least one guide RNA.

[0676] In some embodiments, the composition includes one or more liposomes collectively comprising the one or more nucleic acids. In some embodiments, the one or more nucleic acids are present in a naked state.

[0677] In some embodiments, the Cas9 protein is an S. pyogenes Cas9 polypeptide. In some embodiments, the Cas9 protein is an S. aureus Cas9 polypeptide.

### Methods of Treating Osteoarthritis and Other Diseases

[0678] The compositions and methods described herein can be used in a method for treating diseases. In an embodiment, they are for use in treating inflammatory joint disorders. They may also be used in treating other disorders as described herein and in the following paragraphs. In an aspect, the compositions and methods are used to treat osteoarthritis (OA).

[0679] In some embodiments, the present disclosure provides a method for the treatment or prevention of a joint disease or condition the method comprising introducing a gene-editing system, wherein the gene-editing system targets at least one locus related to joint function. In some embodiments, the joint disease is osteoarthritis. In an aspect, the method is used to treat a canine with osteoarthritis. In another aspect, the method is used to treat a mammal with degenerative joint disease. In some aspects, the method is used to treat a canine or an equine with a joint disease. In some aspects, the method is used to treat osteoarthritis, post-traumatic arthritis, post-infectious arthritis, rheumatoid arthritis, gout, pseudogout, auto-immune mediated arthritides, inflammatory arthritides, inflammation-mediated and immune-mediated diseases of joints.

[0680] In some embodiments, the method further comprises gene-editing a portion of a the joint synoviocytes to reduce or silence the expression of one or more genes provided in Table 1 and/or genes described in FIG. 20, and/or IL-1α, IL-1β, IL-4, IL-9, IL-10, IL-13, and TNF-α. In an aspect, the method further comprises gene-editing a portion of a the joint synoviocytes to reduce or silence the expression of one or more genes provided in Table 1 and/or genes described in FIG. 20.

[0681] In an aspect, the method further comprises gene-editing, wherein the gene-editing comprises one or more methods selected from a CRISPR method, a TALE method, a zinc finger method, and a combination thereof.

[0682] In some aspects, the method further comprises delivering the gene-editing using an AAV vector, a lentiviral vector, or a retroviral vector. In a preferred embodiment, the method further comprises delivering the gene-editing using AAV1, AAV1 (Y705+731F+T492V), AAV2 (Y444+500+730F+T491V), AAV3 (Y705+731F), AAV5, AAV5 (Y436+693+719F), AAV6, AAV6 (VP3 variant Y705F/Y731F/T492V), AAV-7m8, AAV8, AAV8 (Y733F), AAV9, AAV9 (VP3 variant Y731F), AAV10 (Y733F), and AAV-ShH10. In some aspects, the AAV vector comprises a serotype selected from the group consisting of: AAV1, AAV5, AAV6, AAV6 (Y705F/Y731F/T492V), AAV8, AAV9, and AAV9 (Y731F).

### Pharmaceutical Compositions and Methods of Administration

[0683] The methods described herein include the use of pharmaceutical compositions comprising CRISPR gene editing complexes as an active ingredient.

[0684] Depending on the method/route of administration, pharmaceutical dosage forms come in several types. These include many kinds of liquid, solid, and semisolid dosage forms. Common pharmaceutical dosage forms include pill, tablet, or capsule, drink or syrup, and natural or herbal form such as plant or food of sorts, among many others. Notably, the route of administration (ROA) for drug delivery is dependent on the dosage form of the substance in question. A liquid pharmaceutical dosage form is the liquid form of a dose of a chemical compound used as a drug or medication intended for administration or consumption.

[0685] In one embodiment, a composition of the present disclosure can be delivered to a subject subcutaneously (e.g., intra-articular injection), dermally (e.g., transdermally via patch), and/or via implant. Exemplary pharmaceutical dosage forms include, e.g., pills, osmotic delivery systems, elixirs, emulsions, hydrogels, suspensions, syrups, capsules, tablets, orally dissolving tablets (ODTs), gel capsules, thin films, adhesive topical patches, lollipops, lozenges, chewing gum, dry powder inhalers (DPIs), vaporizers, nebulizers, metered dose inhalers (MDIs), ointments, transdermal patches, intradermal implants, subcutaneous implants, and transdermal implants.

[0686] As used herein, “dermal delivery” or “dermal administration” can refer to a route of administration wherein the pharmaceutical dosage form is taken to, or through, the dermis (i.e., layer of skin between the epidermis (with which it makes up the cutis) and subcutaneous tissues). “Subcutaneous delivery” can refer to a route of administration wherein the pharmaceutical dosage form is to or beneath the subcutaneous tissue layer.

[0687] Methods of formulating suitable pharmaceutical compositions are known in the art, see, e.g., Remington: The Science and Practice of Pharmacy, 21st ed., 2005; and the books in the series Drugs and the Pharmaceutical Sciences: a Series of Textbooks and Monographs (Dekker, N.Y.). For example, solutions or suspensions used for parenteral, intradermal, or subcutaneous application can include the following components: a sterile diluent such as water for injection, saline solution, fixed oils, polyethylene glycols, glycerin, propylene glycol or other synthetic solvents; antibacterial agents such as benzyl alcohol or methyl parabens; antioxidants such as ascorbic acid or sodium bisulfate; chelating agents such as ethylenediaminetetraacetic acid; buffers such as acetates, citrates or phosphates and agents for the adjustment of tonicity such as sodium chloride or dextrose. pH can be adjusted with acids or bases, such as hydrochloric acid or sodium hydroxide. The parenteral preparation can be enclosed in ampoules, disposable syringes or multiple dose vials made of glass or plastic.

[0688] Pharmaceutical compositions suitable for injectable use can include sterile aqueous solutions (where water soluble) or dispersions and sterile powders for the extemporaneous preparation of sterile injectable solutions or dispersion. For intravenous administration, suitable carriers include physiological saline, bacteriostatic water, Cremophor EL™ (BASF, Parsippany, N.J.) or phosphate buffered saline (PBS). In all cases, the composition must be sterile and should be fluid to the extent that easy syringability exists. It should be stable under the conditions of manufacture and storage and must be preserved against the contaminating action of microorganisms such as bacteria and fungi. The carrier can be a solvent or dispersion medium containing, for example, water, ethanol, polyol (for example, glycerol, propylene glycol, and liquid polyethylene glycol, and the like), and suitable mixtures thereof. The proper fluidity can be maintained, for example, by the use of a coating such as lecithin, by the maintenance of the required particle size in the case of dispersion and by the use of surfactants. Prevention of the action of microorganisms can be achieved by various antibacterial and antifungal agents, for example, parabens, chlorobutanol, phenol, ascorbic acid, thimerosal, and the like. In many cases, it will be preferable to include isotonic agents, for example, sugars, polyalcohols such as mannitol, sorbitol, sodium chloride in the composition. Prolonged absorption of the injectable compositions can be brought about by including in the composition an agent that delays absorption, for example, aluminum monostearate and gelatin.

[0689] Sterile injectable solutions can be prepared by incorporating the active compound in the required amount in an appropriate solvent with one or a combination of ingredients enumerated above, as required, followed by filtered sterilization. Generally, dispersions are prepared by incorporating the active compound into a sterile vehicle, which contains a basic dispersion medium and the required other ingredients from those enumerated above. In the case of sterile powders for the preparation of sterile injectable solutions, the preferred methods of preparation are vacuum drying and freeze-drying, which yield a powder of the active ingredient plus any additional desired ingredient from a previously sterile-filtered solution thereof.

[0690] Therapeutic compounds that are or include nucleic acids can be administered by any method suitable for administration of nucleic acid agents, such as a DNA vaccine. These methods include gene guns, bio injectors, and skin patches as well as needle-free methods such as the micro-particle DNA vaccine technology disclosed in U.S. Pat. No. 6,194,389, and the mammalian transdermal needle-free vaccination with powder-form vaccine as disclosed in U.S. Pat. No. 6,168,587. Additionally, intranasal delivery is possible, as described in, inter alia, Hamajima et al., Clin. Immunol. Immunopathol., 88(2), 205-10 (1998). Liposomes (e.g., as described in U.S. Pat. No. 6,472,375) and microencapsulation can also be used. Biodegradable targetable microparticle delivery systems can also be used (e.g., as described in U.S. Pat. No. 6,471,996).

[0691] Therapeutic compounds can be prepared with carriers that will protect the therapeutic compounds against rapid elimination from the body, such as a controlled release formulation, including implants and microencapsulated delivery systems. Biodegradable, biocompatible polymers can be used, such as collagen, ethylene vinyl acetate, polyanhydrides (e.g., poly[1,3-bis(carboxyphenoxy)propane-co-sebacic-acid] (PCPP-SA) matrix, fatty acid dimer-sebacic acid (FAD-SA) copolymer, poly(lactide-co-glycolide)), polyglycolic acid, collagen, polyorthoesters, polyethyleneglycol-coated liposomes, and polylactic acid. Such formulations can be prepared using standard techniques, or obtained commercially, e.g., from Alza Corporation and Nova Pharmaceuticals, Inc. Liposomal suspensions (including liposomes targeted to selected cells with monoclonal antibodies to cellular antigens) can also be used as pharmaceutically acceptable carriers. These can be prepared according to methods known to those skilled in the art, for example, as described in U.S. Pat. No. 4,522,811. Semisolid, gelling, soft-gel, or other formulations (including controlled release) can be used, e.g., when administration to a surgical site is desired. Methods of making such formulations are known in the art and can include the use of biodegradable, biocompatible polymers. See, e.g., Sawyer et al., Yale J Biol Med. 2006 December; 79(3-4): 141-152.

[0692] The pharmaceutical compositions can be included in a container, kit, pack, or dispenser together with instructions for administration.

### EXAMPLES

[0693] The embodiments encompassed herein are now described with reference to the following examples. These examples are provided for the purpose of illustration only and the disclosure encompassed herein should in no way be construed as being limited to these examples, but rather should be construed to encompass any and all variations which become evident as a result of the teachings provided herein.

### Example 1. Reducing Gene Expression by CRISPR Gene-Engineering in a Mouse Model of Osteoarthritis

[0694] C57B mice are selected and distributed into 182 groups of fifteen mice each. The DMM surgical method is used to induce OA in each of the mice. Once the mice have developed OA, the mice are treated as follows:

[0695] Groups 1-179: For each group, directly inject into the OA joint a CRISPR AAV vector engineered to target a gene selected from PGD, ADH1A, ADH1B, ADH1C, ADH4, ADH5, ADH6, ADH7, ALDH2, JUN, BCL2L1, BCL2, BAX, CAT, MAPK8, COQ10A, COQ10B, CYP2E1, CYCS, ATP5MF, FTH1, G6PD, GCLC, GSS, GPX1, GPX2, GPX3, GPX4, GPX5, GPX6, GPX7, GPX8, GSR, GPD1, GPD2, GADD45A, GADD45B, GADD45G, HIF1A, MAPK1, NOX1, NOX3, NOX4, NOX5, NDUFS1, NDUFA1, NFKB1, NFKB2, IKBKG, SHC1, SHC2, SHC3, SHC4, BBC3, PIK3CA, PIK3CB, PIK3CG, PRODH, PRODH2, NQO1, NDUFV2, SDHA, SDHB, SDHC, SDHD, CYC1, COX1, SESN1, SESN2, SOD1, SOD2, SOD3, TNFAIP3, TP53, TP53INP1, UQCRC1, UQCRC2, CD244, ABCA1, ACP5, ADAR, ADSS1, ADSS2, AIG1, AIM2, APOBEC3A, APOBEC3B, APOBEC3C, APOBEC3D, APOBEC3F, APOBEC3G, APOBEC3H, ARRB2, B2M, BCAS3, BMP4, BORCS7, GATD3A, GATD3B, CASP1, CCL5, CD160, CDKN2A, CD53, CHEK1, CNNM2, CNTNAP2, CSMD1, CTSB, CTLA4, CLEC1A, CXCL10, CYP17A1, DDX60, DYNC1I1, FOXO3, GPC6, GRN, HCK, HECW1, IFI30, IFI44L, IFI6, IFITM1, IFITM3, IFITM2, IL18, IL1A, IL1B, IFNG, IL12A, IL12B, IRF1, IRF3, IRF7, LAG3, LIPC, IFIH1, MYH9, MYO16, MYO5A, NAIP, NLRC4, NLRP3, NOD2, NPL, NRROS, NLRX1, OAS1, OAS2, OASL, PRKN, PDCD1, PLEKHG1, PRKCA, PTBP1, PYCARD, PYHIN1, DDX58, RFC3, RGS1, SAMHD1, SF3A1, SF3B1, SFXN2, SLAMF7, SLC41A1, SLC8A1, SLCO3A1, STAT1, BST2, TLR5, TLR7, TLR9, TREM2, TREX1, TRIM5, TTLL7, and TYROBP, such that a construct directed against each of the genes listed above is tested in one group.

[0696] Group 180: Direct injection into the OA joint a CRISPR AAV vector engineered with a “nonsense” payload that will not affect expression of any of the genes listed above; a negative control.

[0697] Group 181: Direct injection into the OA joint a CRISPR AAV vector engineered to target a gene that is not associated with the production, blocking, or removal of reactive oxygen species (ROS).

[0698] Group 4: Direct injection into the OA joint sterile buffered saline; a control for the injection process.

[0699] The mice are monitored before and after treatment to assess effects on their locomotion, and exploratory activities. Mechanical sensitivity and changes to the gait are also monitored. Allodynia and hind limb grip force may also be monitored.

[0700] After about eight weeks, the animals are sacrificed and the OA joint tissue assessed for gross histopathology, and expression of the genes listed above by IHC. Biomarkers of inflammation are also assessed, for example, MMP-3 expression in the OA joint.

[0701] Mice from groups 1-179 mice, treated with a CRISPR AAV vector engineered to target a gene associated with the production, blocking, or removal of reactive oxygen species (ROS), will show reduced levels of the targeted gene by IHC, tissue regeneration by histopathology, and lower levels of inflammation biomarkers than any of the three other Groups. Group 180 mice will show relatively higher levels of inflammation biomarker than any of the other three groups.

### Example 2. Assessing Guide Cutting Efficiency Against Mouse IL1A and IL1B

### In Vitro Cleavage Assay

[0702] CRISPR guide RNA's (Phosphorothionate-modified sgRNA, Table 3) were designed against Exon 4 of Il1a and Exon 4 of Il1b (Il1a-201 ENSMUST00000028882.1 and Il1b-201 ENSMUST00000028881.13; see Table 2 for target sequences on Exon 4 of Il1a and Exon 4 of Il1b). C57BL/6 mouse genomic DNA was used to amplify Exon 4 of Il1a and Il1b by PCR (Phusion High-Fidelity DNA polymerase, NEB cat #M0530S) Il1a primer fwd: CATTGGGAGGATGCTTAGGA (SEQ ID NO:620), Il1a primer rev: GGCTGCTTTCTCTCCAACAG (SEQ ID NO:621), Il1b primer fwd: AGGAAGCCTGTGTCTGGTTG (SEQ ID NO:622), Il1b primer rev: TGGCATCGTGAGATAAGCTG (SEQ ID NO:623). Amplicons were PCR purified (QiaQuick PCR purification kit cat #28106). Guide cutting efficiency was determined using an in vitro cleavage assay using 100 ng purified PCR product, 200 ng modified guide RNA (Sigma Aldrich) and 0.5 μg TrueCut Spy Cas9 protein V2 (Invitrogen A36498) or 0.5 μg Gene Snipper NLS Sau Cas9 (BioVision Cat #M1281-50-1). The two types of Cas9, S. pyogenes Cas9 and S. aureus Cas9, were compared for their editing capabilities. A 2% agarose gel was used for a qualitative readout of the cleavage assay.

### Editing Cell Lines

[0703] CRISPR guide RNA's (Phosphorothionate-modified sgRNA, Table 2) were designed against Exon 4 of Il1a and Exon 4 of Il1b (Il1a-201 ENSMUST00000028882.1 and Il1b-201 ENSMUST00000028881.13). Guide RNA cutting efficiency was determined in a pool of J774.2 and NIH3T3 cells using Sanger sequencing and Synthego ICE (see, e.g., Inference of CRISPR Edits from Sanger Trace Data, Hsiau T, Maures T, Waite K, Yang J et al. biorxiv. 2018, which is incorporated by reference herein for all purposes), or TIDE (see, e.g., Easy quantitative assessment of genome editing by sequence trace decomposition, Brinkman E, Chen T, Amendola M and Van Steensel B. Nucleic Acids res 2014, which is incorporated by reference herein for all purposes) web tools to calculate percent editing. The experiment also compared the efficiency of S. pyogenes Cas9 and S. aureus Cas9. The cells were electroporated (Amaxa 4D Nucleofector unit, Lonza) with 5 μg TrueCut Spy Cas9 protein V2 (Invitrogen A36498) or 5 μg EnGen Sau Cas9 protein (NEB M0654T) with 100 pmol modified guide RNA (Sigma Aldrich). SF nucleofector solution and programme CM139 was used for J774.2 cells and SG nucleofector solution and programme EN158 was used for NIH3T3 cells. A cell pellet was taken 3 days' post electroporation and gDNA was extracted from each pool (Qiagen, DNeasy blood and tissue kit, 69506). Exon 4 of Il1a or Il1b was amplified in the appropriate pool by PCR (Phusion High-Fidelity DNA polymerase, NEB, cat #M0530S). Il1a primer fwd: TGGTTTCAGGAAAACCCAAG (SEQ ID NO:624), Il1a primer rev: GCAGTATGGCCAAGAAAGGA (SEQ ID NO:625), Il1b primer fwd: AGGAAGCCTGTGTCTGGTTG (SEQ ID NO:622), Il1b primer rev: CTGGGCAAGAACATTGGATT (SEQ ID NO:626). Amplicons were subjected to Sanger sequencing, and analyzed using either the Synthego ICE or TIDE web tools to determine the absence of wild type sequence in each clone and the presence of indels resulting in a frameshift in the cDNA sequence.

TABLE 2
Target Il1a and Il1b Sequences

| Ident- | Guide | | | | Target | |
|---|---|---|---|---|---|---|
| ifier | ID | Gene | Exon | Cas9 | Sequence 5′-3′ | PAM |
| SEQ ID | sg43 | Il1a | 4 | S.pyogenes | GTATCAGCAACGTC | CGG |
| NO: 7 | | | | | AAGCAA | |
| SEQ ID | sg44 | Il1a | 4 | S.pyogenes | CTGCAGGTCATCTT | AGG |
| NO: 8 | | | | | CAGTGA | |
| SEQ ID | sg45 | Il1a | 4 | S.pyogenes | TATCAGCAACGTCA | GGG |
| NO: 9 | | | | | AGCAAC | |
| SEQ ID | sg46 | Il1a | 4 | S.pyogenes | GCCATAGCTTGCAT | AGG |
| NO: 10 | | | | | CATAGA | |
| SEQ ID | sg47 | Il1b | 4 | S.pyogenes | CATCAACAAGAGCT | AGG |
| NO: 11 | | | | | TCAGGC | |
| SEQ ID | sg48 | Il1b | 4 | S.pyogenes | TGCTCTCATCAGGA | AGG |
| NO: 12 | | | | | CAGCCC | |
| SEQ ID | sg49 | Il1b | 4 | S.pyogenes | GCTCATGTCCTCAT | AGG |
| NO: 13 | | | | | CCTGGA | |
| SEQ ID | sg50 | Il1b | 4 | S.pyogenes | CCTCATCCTGGAAG | GGG |
| NO: 14 | | | | | GTCCAC | |
| SEQ ID | sg51 | Il1a | 4 | S.aureus | TTACTCCTTACCTT | ATG |
| NO: 15 | | | | | CCAGATC | GGT |
| SEQ ID | sg52 | Il1a | 4 | S.aureus | GAAACTCAGCCGTC | CAG |
| NO: 16 | | | | | TCTTCTT | AAT |
| SEQ ID | sg53 | Il1a | 4 | S.aureus | CAACTTCACCTTCA | CCG |
| NO: 17 | | | | | AGGAGAG | GGT |
| SEQ ID | sg54 | Il1b | 4 | S.aureus | GTGTCTTTCCCGTG | CAG |
| NO: 18 | | | | | GACCTTC | GAT |
| SEQ ID | sg55 | Il1b | 4 | S.aureus | CACAGCTTCTCCAC | AGT |
| NO: 19 | | | | | AGCCACA | AGT |
| SEQ ID | sg56 | Il1b | 4 | S.aureus | GTGCTGCTGCGAGA | CTG |
| NO: 20 | | | | | TTTGAAG | GAT |

TABLE 3
CRISPR Guide RNA's.

| Ident- | Guide | | | | CRNA | |
|---|---|---|---|---|---|---|
| ifier | ID | Gene | Exon | Cas9 | Sequence 5′-3′ | PAM |
| SEQ ID | sg43 | Il1a | 4 | S.pyogenes | GUAUCAGCAACGUC | CGG |
| NO: 21 | | | | | AAGCAA | |
| SEQ ID | sg44 | Il1a | 4 | S.pyogenes | CUGCAGGUCAUCUU | AGG |
| NO: 22 | | | | | CAGUGA | |
| SEQ ID | sg45 | Il1a | 4 | S.pyogenes | UAUCAGCAACGUCA | GGG |
| NO: 23 | | | | | AGCAAC | |
| SEQ ID | sg46 | Il1a | 4 | S.pyogenes | GCCAUAGCUUGCAU | AGG |
| NO: 24 | | | | | CAUAGA | |
| SEQ ID | sg47 | Il1b | 4 | S.pyogenes | CAUCAACAAGAGCU | AGG |
| NO: 25 | | | | | UCAGGC | |
| SEQ ID | sg48 | Il1b | 4 | S.pyogenes | UGCUCUCAUCAGGA | AGG |
| NO: 26 | | | | | CAGCCC | |
| SEQ ID | sg49 | Il1b | 4 | S.pyogenes | GCUCAUGUCCUCAU | AGG |
| NO: 27 | | | | | CCUGGA | |
| SEQ ID | sg50 | Il1b | 4 | S.pyogenes | CCUCAUCCUGGAAG | GGG |
| NO: 28 | | | | | GUCCAC | |
| SEQ ID | sg51 | Il1a | 4 | S.aureus | UUACUCCUUACCUU | ATG |
| NO: 29 | | | | | CCAGAUC | GGT |
| SEQ ID | sg52 | Il1a | 4 | S.aureus | GAAACUCAGCCGUC | CAG |
| NO: 30 | | | | | UCUUCUU | AAT |
| SEQ ID | sg53 | Il1a | 4 | S.aureus | CAACUUCACCUUCA | CCG |
| NO: 31 | | | | | AGGAGAG | GGT |
| SEQ ID | sg54 | Il1b | 4 | S.aureus | GUGUCUUUCCCGUG | CAG |
| NO: 32 | | | | | GACCUUC | GAT |
| SEQ ID | sg55 | Il1b | 4 | S.aureus | CACAGCUUCUCCAC | AGT |
| NO: 33 | | | | | AGCCACA | AGT |
| SEQ ID | sg56 | Il1b | 4 | S.aureus | GUGCUGCUGCGAGA | CTG |
| NO: 34 | | | | | UUUGAAG | GAT |

[0704] Each CRNA (see, e.g., Table 3) was synthesized as a single guide RNA consisting of the cRNA sequences above fused to the tracrRNA sequences below (see, e.g., SEQ ID Nos: 35-36). In certain embodiments, an A< >U flip is used to increase guide RNA activity.

Sau Cas9:
(SEQ ID NO: 35)
GUUAUAGUACUCUGGAAACAGAAUCUACUAAAACAAGGCAAAAUGCCGU
GUUUAUCUCGUCAACUUGUUGGCGAGAUUUUU
Spy Cas9:
(SEQ ID NO: 36)
GUUAUAGAGCUAGAAAUAGCAAGUUAAAAUAAGGCUAGUCCGUUAUCAA
CUUGAAAAAGUGGCACCGAGUCGGUGCUUUUUU

### In Vitro Cleavage Assay

[0705] FIG. 1A illustrates agarose gel electrophoresis analysis of 100 ng mouse DNA, cleaved by 0.5 μg Spy Cas9 and 200 ng modified guide RNA's 43-46 for Il1a gene and 47-50 for IL1B. DNA is cut at a specific site by the cas9 using the guide RNA to create a predictable band pattern on the agarose gel compared to the uncut control (without wishing to be bound by any particular theory, the agarose gel electrophoresis for sg8* appears to show a failed synthesis).

[0706] FIG. 1B illustrates agarose gel electrophoresis analysis of 100 ng mouse DNA, cleaved by 0.5 μg Sau Cas9 and 200 ng modified guide RNA's 51-53 for Il1a gene and 54-56 for Il1b. DNA is cut at a specific site by the Cas9 using the guide RNA to create a predictable band pattern on the agarose gel compared to the uncut control.

### Editing Cell Lines

[0707] Genomic DNA was extracted from the edited pools and the Il1a or Il1b exon 4 was PCR amplified in the appropriate pools. The PCR products were sent for sanger sequencing and then deconvoluted using TIDE or Synthego ICE software. Synthego ICE was used to deconvolute the Spy Cas9 pools. The software can determine the patterns of editing in each pool based on the guide RNA sequence and PAM site. It can distinguish between editing which has caused an in frame deletion that could lead to a truncated functional protein, and editing which has causes a frameshift mutation which will lead to a true knockout. The SauCas9 pools were analysed with TIDE because Synthego ICE software cannot deconvolute SauCas9 editing. TIDE analysis works in a similar way to ICE by determining patterns of editing in a pool based on the guide RNA and PAM site. However, rather than giving a true knockout score, it gives an editing efficiency score, which cannot distinguish between in frame and frameshift editing patterns. Therefore, editing efficiency scores may over represent the guide RNA's ability to knockout a protein. SpyCas9 is the standard protein used in CRISPR gene editing. However, it is 4101 bp compared to Sau Cas9 which is 3156 bp. Due to the size limitations of packaging some viruses, such as AAV, it was decided to compare the editing capabilities of SauCas9 and SpyCas9 to see whether the smaller Sau Cas9 could be used in the vector being designed for this project.

[0708] FIGS. 2A-2D illustrate graphs displaying editing efficiencies of Spy Cas9 (FIGS. 2A and 2B) and SauCas9 (FIGS. 2C and 2D) used with a range of guide RNA's in J774.2 (“J”) and NIH3T3 (“N”) cells. Editing efficiencies were determined using Synthego ICE or TIDE sanger deconvolution software. FIG. 2A: knock out efficiency of Il1a using guide RNA 43-46 with SpyCas9 in J774.2 and NIH3T3. Synthego ICE was used to deconvolute the sanger sequence trace and determine knock out efficiency. FIG. 2B: knock out efficiency of Il1b using guide RNA 47-50 with SpyCas9 in J774.2 and NIH3T3; without wishing to be bound by any particular theory, the data for sgRNA8 appears to show a failed synthesis. Synthego ICE was used to deconvolute the sanger sequence trace and determine knock out efficiency. FIG. 2C: knock out efficiency of Il1a using guide RNA 51-53 with saCas9 in J774.2 and NIH3T3. TIDE was used to deconvolute the sanger sequence trace and determine the editing efficiency. FIG. 2D: knock out efficiency of Il1b using guide RNA 54-56 with Sau Cas9 in J774.2 and NIH3T3. TIDE was used to deconvolute the sanger sequence trace and determine the editing efficiency.

### Example 3. Reducing IL-10 Expression by CRISPR Gene-Engineering in a Mouse Uric Acid Model

### Time Course Experiment to Determine Optimal Pre-Treatment Time

[0709] A pilot experiment is performed to determine optimal pre-treatment time of mice with virus prior to challenging the mice with uric acid. Mice are injected with GFP-labeled AAV5 vector into the knee joint. Viral load is then quantified by PCR and location of viral infection is quantified by histology at 3, 5, and 7 days after infection. A treatment time that yields robust expression of virus inside the joint is selected as the optimal lead time for injecting viral vectors into the mice for the experiments to determine the reduction of IL-1b in a mouse uric acid model by a CRISPR AAV vector engineered to target IL-1b and silence or reduce expression of IL-1b.

### Experiment to Confirm CRISPR AAV (AAV-spCas9) Knock Down of IL-1b Expression and Treatment Effect in Uric Acid Model

[0710] Mice are selected and distributed into three groups:
[0711] Group 1: mice injected with a CRISPR AAV vector (AAV-spCas9) engineered to target IL-1b, and silence or reduce expression of IL-1 protein,
[0712] Group 2: mice injected with “scrambled” guide RNA/Cas9 (AAV-spCas9), a CRISPR AAV vector engineered with a payload that will not affect IL-1 production, and
[0713] Group 3: mice injected with saline.

[0714] The mice are then challenged with uric acid after an optimal pre-treatment time. Within 24 hours of injection with uric acid, the animals are sacrificed and the joint tissue is analyzed for cytokine expression (e.g., assessed for IL-1 expression by IHC). The joint tissue may also be assessed for gross histopathology and for expression of biomarkers of inflammation.

[0715] Group 1 mice treated with a CRISPR AAV vector engineered to target IL-1b, and silence or reduce the expression of IL-1 protein, will show reduced levels of IL-1 by IHC and lower levels of inflammation biomarkers than any of the two other groups.

### Example 4. Time Course Study of Intra-Articular Injection of AAV in Mice

[0716] A study was conducted to evaluate the time course for injecting AAV into the joint of male C57BL/6 mice.

### Materials & Methods

[0717] Test Article Identification and Preparation—The eGFP AAVPrime™ Purified Adeno-associated Viral Particles: GFP-tagged AAV5 GeneCopoeia™, catalogue No. AB201, lot No. GC08222K1902, 1.18×10¹³ Genome Copies/mL) and AAV6 (GeneCopoeia™ catalogue No. AB401, lot No. GC09242K1905, 5.47×10¹² Genome Copies/mL) we supplied. AAV-particles were shipped on dry ice and were stored at −80° C. immediately upon receipt. Just prior to dosing, the AAV-particles were reconstituted in phosphate buffered saline (PBS without calcium and magnesium: Corning, lot No. 11419005) for IA dosing at 10 μL per knee. See the study protocol (Appendix A) for additional details of test article preparation, storage, and handling.

[0718] Test System Identification-Male C57BL/6 mice (N=30) that were 8 to 10 weeks old were obtained from The Jackson Laboratory (Bar Harbor, ME). The mice weighed approximately 24 to 29 grams (mean of 26 g) at enrollment on study day 0. The animals were identified by a distinct mark at the base of the tail delineating group and animal number. After randomization, all cages were labeled with protocol number, group numbers, and animal numbers with appropriate color-coding (Appendix A).

[0719] Environment & Husbandry-Upon arrival, the animals were housed 3 to 5 per cage in polycarbonate cages with wood chip bedding and suspended food and water bottles. The mice were housed either in shoebox cages (static airflow, approximately 70 in2 floor space) with filter tops or in individually ventilated pie cages (passive airflow, approximately 70-75 in2 floor space). Animal care including room, cage, and equipment sanitation conformed to the guidelines cited in the Guide for the Care and Use of Laboratory Animals (8th Edition). National Research Council, National Academy of Sciences, Washington, D C, 2011, which is incorporated by reference herein in its entirety for all purposes.

[0720] The animals were acclimated for 4 days prior to being paced in the study. An attending veterinarian was on site or on call during the live phase of the study. No concurrent medications were given.

[0721] During the acclimation and study periods, the animals were housed in a laboratory environment with temperatures ranging 19° C. to 25° C. and relative humidity of 30% to 70%. Automatic timers provided 12 hours of light and 12 hours of dark. The animals were allowed access ad libitum to Envigo Teklad 8640 diet and fresh municipal tap water.

[0722] Experimental Design-On study day 0, the mice were randomized by body weight into treatment groups. Following randomization, the animals were dosed by intra-articular (IA) injection as indicated in Table 4. Animal body weights were measured as described in section 8.5.1. The mice were euthanized for necropsy and tissue collection at 3 time points (days 3, 5, and 7) as described below in the section titled ‘Necropsy Specimens’.

TABLE 4
Group and Treatment Information

| | | | Dose Level | Dose | Dose Conc. | Dose | |
|---|---|---|---|---|---|---|---|
| Group | N | Treatment | (particles) | Vol. | (particles/ml) | Route | Regimen |
| 1 | 30 | GFP-tagged | 5 × 10⁹ | 10 μL | 5 × 10₁₁/mL | IA (right | 1x (Day 0) |
| | | AAV5 | | | | knee) | |
| | | GFP-tagged | 5 × 10⁹ | 10 μL | 5 × 10¹¹/mL | IA (left | 1x (Day 0) |
| | | AAV6 | | | | knee) | |

### Observations, Measurements, and Specimens

[0723] Body Weight Measurements—The mice were weighed for randomization on study day 0 and again on days 1, 3, 5, and 7. Body weight measurements can be found in Table 6.

[0724] Necropsy Specimens—The mice were necropsied on study days 3, 5, and 7 as indicated in Table 5.

TABLE 5
Necropsy Schedule

| Group | Animal No. | Time-point(s) |
|---|---|---|
| 1 | 1-10 | Day 3 |
| 1 | 11-20 | Day 5 |
| 1 | 21-30 | Day 7 |

[0725] At necropsy, the mice were bled to exsanguination via cardiac puncture followed by cervical dislocation. Right and left knees were harvested from all animals. The skin and muscle were removed from the joints while keeping the joint capsule intact. Joints were flash-frozen separately in 15-mL conical tubes labeled with only mouse number, day of collection, and right or left leg. Knee joints were stored frozen at −80° C. for shipment.

[0726] Animal Disposition-Animal carcasses were disposed of according to BBP SOPs.

[0727] Specimen and Raw Data Storage-Specimens (right and left knee joints), study data, and reports were delivered during or at the completion of the study.

[0728] Statement of Effect of Deviations on the Quality and Integrity of the Study—There were no deviations from the study protocol.

### Results/Conclusions

[0729] On study day 0, male C57BL/6 mice received IA injections of GFP-tagged AAV5 (5×10⁹ particles, 10 μL) into right knees and IA injections of GFP-tagged AAV6 (5×10⁹ particles, 10 μL) into left knees. The animals were weighed on study days 0, 1, 3, 5, and 7. Necropsies were performed on study day 3 (animals 1-10), day 5 (animals 11-20), and day 7 (animals 21-30), and right and left knee joints were collected for shipment. The live portion of this study was completed successfully including animal weighing, dosing, and biological sample collection. All animals survived to study termination.

### REFERENCES

[0730] Guide for the Care and Use of Laboratory Animals (8th Edition). National Research Council, National Academy of Sciences, Washington, D C, 2011, which is incorporated by reference herein in its entirety for all purposes.

TABLE 6
Body Weight and Dose Calculation Data (MTC-UCM-1)

| Treatment | | | | | | |
|---|---|---|---|---|---|---|
| Group | | | | | | |
| Group 1 | Day 0 | Day 0 | Day 1 | | Day 3 | |
| C57B1/6 | Body Wt. | Dose Val. | Body Wt. | Body Wt. % Δ | Body Wt. | Body Wt. % Δ |
| IA, 1x (D 0) | (g) | 10 μl (ml) | (g) | Baseline | (g) | Baseline |
| 1 | 26.68 | 0.01 | 26.53 | −0.6% | 26.22 | −1.7% |
| 2 | 27.65 | 0.01 | 27.55 | −0.4% | 26.54 | −4.0% |
| 3 | 28.64 | 0.01 | 27.97 | −2.3% | 28.57 | −0.2% |
| 4 | 28.13 | 0.01 | 27.60 | −1.9% | 27.63 | −1.8% |
| 5 | 26.18 | 0.01 | 26.07 | −0.4% | 25.87 | −1.2% |
| 6 | 26.38 | 0.01 | 26.02 | −1.4% | 26.30 | −0.3% |
| 7 | 29.13 | 0.01 | 29.11 | −0.1% | 28.83 | −1.0% |
| 8 | 24.22 | 0.01 | 23.90 | −1.3% | 23.51 | −2.9% |
| 9 | 25.40 | 0.01 | 24.97 | −1.7% | 24.49 | −3.6% |
| 10 | 24.85 | 0.01 | 24.21 | −2.6% | 23.86 | −4.0% |
| 11 | 27.76 | 0.01 | 27.26 | −1.8% | 28.02 | 0.9% |
| 12 | 25.23 | 0.01 | 24.77 | −1.8% | 24.90 | −1.3% |
| 13 | 24.92 | 0.01 | 24.45 | −1.9% | 24.39 | −1.3% |
| 14 | 24.33 | 0.01 | 24.19 | −0.6% | 23.86 | −1.9% |
| 15 | 23.82 | 0.01 | 23.81 | 0.0% | 23.26 | −2.4% |
| 16 | 24.83 | 0.01 | 24.39 | −1.8% | 24.15 | −2.7% |
| 17 | 25.94 | 0.01 | 25.93 | 0.0% | 26.28 | 1.3% |
| 18 | 27.21 | 0.01 | 27.44 | 0.8% | 27.60 | 1.4% |
| 19 | 25.61 | 0.01 | 25.17 | −1.7% | 25.22 | −4.5% |
| 20 | 27.81 | 0.01 | 27.26 | −2.0% | 26.99 | −2.9% |
| 21 | 26.63 | 0.01 | 26.63 | 0.0% | 26.71 | 0.3% |
| 22 | 26.96 | 0.01 | 27.40 | 1.6% | 23.75 | −4.5% |
| 23 | 27.69 | 0.01 | 27.21 | −1.7% | 27.22 | −1.7% |
| 24 | 25.90 | 0.01 | 25.71 | −0.7% | 25.45 | −1.7% |
| 25 | 24.03 | 0.01 | 24.11 | 0.3% | 23.40 | −2.6% |
| 26 | 27.60 | 0.01 | 26.67 | −3.4% | 27.00 | −2.2% |
| 27 | 27.87 | 0.01 | 27.59 | −1.0% | 27.22 | −2.3% |
| 28 | 24.43 | 0.01 | 24.25 | −0.7% | 24.14 | −1.2% |
| 29 | 26.75 | 0.01 | 26.02 | −2.7% | 26.46 | −1.1% |
| 30 | 25.93 | 0.01 | 25.99 | 0.2% | 23.80 | −0.3% |
| Mean | 26.28 | | 26.01 | −1.0% | 25.86 | −1.6% |
| SE | 0.27 | | 8.27 | 0.2% | 0.29 | 0.3% |

| Treatment | | | | | |
|---|---|---|---|---|---|
| Group | | | | | |
| Group 1 | Day 5 | | Day 7 | | Change in Body |
| C57B1/6 | Body Wt. | Body Wt. % Δ | Body Wt. | Body Wt. % Δ | weight from |
| IA, 1x (D 0) | (g) | Baseline | (g) | Baseline | Baseline (g) |
| 1 | | | | | −0.46 |
| 2 | | | | | −1.11 |
| 3 | | | | | −0.07 |
| 4 | | | | | −0.50 |
| 5 | | | | | −0.31 |
| 6 | | | | | −0.08 |
| 7 | | | | | −0.30 |
| 8 | | | | | −0.71 |
| 9 | | | | | −0.91 |
| 10 | | | | | −0.99 |
| 11 | 28.62 | 3.1% | | | 0.86 |
| 12 | 25.04 | −0.8% | | | −0.19 |
| 13 | 24.94 | 0.1% | | | 0.02 |
| 14 | 23.68 | −2.7% | | | −0.65 |
| 15 | 23.71 | −0.5% | | | −0.11 |
| 16 | 24.26 | −2.3% | | | −0.57 |
| 17 | 26.15 | 0.8% | | | 0.21 |
| 18 | 27.88 | 2.5% | | | 0.67 |
| 19 | 25.64 | 0.1% | | | 0.03 |
| 20 | 27.71 | −0.4% | | | −0.10 |
| 21 | 26.44 | −0.7% | 26.70 | 0.3% | 0.07 |
| 22 | 25.76 | −4.5% | 25.75 | −4.5% | −1.21 |
| 23 | 27.53 | −0.6% | 27.33 | −1.3% | −0.36 |
| 24 | 25.61 | −1.1% | 26.00 | 0.4% | 0.10 |
| 25 | 23.76 | −1.1% | 24.10 | 0.3% | 0.07 |
| 26 | 27.44 | −0.6% | 27.18 | −1.5% | −0.42 |
| 27 | 27.09 | −2.8% | 27.30 | −2.0% | −0.57 |
| 28 | 24.50 | 0.3% | 24.76 | 1.4% | 0.33 |
| 29 | 26.48 | −1.0% | 26.48 | −1.0% | −0.27 |
| 30 | 25.73 | −0.8% | 25.89 | −0.2% | −0.04 |
| Mean | 25.90 | −0.6% | 26.15 | −0.8% | −0.25 |
| SE | 0.33 | 0.4% | 0.34 | 0.5% | 0.09 |

### Protocol

### Test System

[0731] Number of animals: 33 (30+3 extra)
[0732] Species/Strain or Breed: C₅₇BL/6
[0733] Vendor: Jackson
[0734] Age/Wt at Arrival: 8-10 weeks old (˜20 grams)
[0735] Gender: Male
[0736] Age/Wt Range at Study Initiation: At least 9 weeks by study initiation
[0737] Acclimation: Will be acclimated for at least 3 days after arrival at BBP
[0738] Housing: 3-5 animals/cage

### Study Calendar

| Mon | Tue | Wed | Thu | Fri | Sat | Sun |
|---|---|---|---|---|---|---|
| Week 1 | Week 1 | Week 1 | Week 1 | Week 1 | Week 1 | Week 1 |
| Day −4 | Day −3 | Day −2 | Day −1 | Day 0 | Day 1 | Day 2 |
| Distribute | | | | Weigh & | Weigh | |
| animals on | | | | Randomize. IA | | |
| arrival into | | | | Injections | | |
| groups for | | | | | | |
| acclimation | | | | | | |
| Week 2 | Week 2 | Week 2 | Week 2 | Week 2 | Week 2 | Week 2 |
| Day 3 | Day 4 | Day 5 | Day 6 | Day 7 | Day 8 | Day 9 |
| Weigh, | | Weigh, Necropsy | | Weigh, Necropsy | | |
| Necropsy | | Animals 11-20 | | Animals 21-30 | | |
| Animals 1-10 | | | | | | |

### Materials

| Name | Supplier | Cat #* |
|---|---|---|
| Isoflurane | VetOne | 502017 |
| Syringes & Needles | BD | As needed |
| Serum Separator Tubes (if needed) | Greiner Bio-One | #450472 (via Fisher) |
| Li Hep Mini-Collect (if needed) | Greiner Bio-One | #450480 (via Fisher) |
| EDTA Mini-Collect (if needed) | Greiner Bio-One | #450477 (via Fisher) |
| K3EDTA (if needed) | Covidien | #8881311149 (via Fisher) |
| K2EDTA Vacutainer (if needed) | BD | #367856 (via Fisher) |
| Na Hep Vacutainer (if needed) | BD | #367871 (via Fisher) |
| Li Hep Vacutainer (if needed) | BD | #367960 (via Fisher) |

### Test Article and Vehicle Information

[0741] Unformulated Test Article Storage Conditions—GFP-tagged AAV5 (Group 1): −80 C; GFP-tagged AAV6 (Group 1): −80° C.

[0742] Vehicle Information—GFP-tagged AAV5 (Group 1): PBS (w/o Ca & Mg); GFP-tagged AAV6 (Group 1): PBS (w/o Ca & Mg).

[0743] Test Article Formulation Instructions & Calculations—GFP-tagged AAV5 (Group 1): Dilute stock to appropriate concentration using PBS; GFP-tagged AAV6 (Group 1): Dilute stock to appropriate concentration using PBS.

[0744] Dosing Formulations and Vehicle Storage & Stability—GFP-tagged AAV5 (Group 1): Dilute just prior to injecting; GFP-tagged AAV6 (Group 1): Dilute just prior to injecting.

[0745] Disposition of Test Articles Following Dosing—GFP-tagged AAV5 (Group 1): Discard formulations, retain stock solution for future studies; GFP-tagged AAV6 (Group 1): Discard formulations, retain stock solution for future studies.

### Live Phase Deliverables

Live Phase Data Collection

| | | | |
|---|---|---|---|
| Type | Study Day | Grp (An) | Details |

| | | |
|---|---|---|
| Body Weight | Day 0, 1, 3, 5, 7 | All |
| | | [symbol] |

[symbol]

indicates data missing or illegible when filed

### Necropsy Information

[0747] Sacrifice Schedule: Group 1 An 1-10: Day 3
[0748] Group 1 An 11-20: Day 5
[0749] Group 1 An 21-30: Day 7
   Method of Euthanasia: Bleed by cardiac puncture to exsanguinate followed by cervical dislocation.

### Time Points: Not Timed

Necropsy Tissue Sample Collection:

| Type | Gr/An | Details | Storage Condition | Disposition |
|---|---|---|---|---|
| Right Injected | All | Remove skin and | Flash Freeze | Ship |
| Knee | | muscle keeping joint | (15 ml conical vial*) | |
| | | capsule intact | | |
| Left Injected | All | Remove skin and | Flash Freeze | Ship |
| Knee | | muscle keeping joint | (15 ml conical vial*) | |
| | | capsule intact | | |

*Label tubes with only mouse number, day of collection, and left or right leg. Samples will be tested without reference to whether they are AAV-2 or AAV-5 injected. Key to be provided only after PCR completion.

### Sample Analysis

[0751] Tissue Specimens-Hind limbs from AAV-injected mice were snap-frozen and shipped. On arrival, specimens were transferred to the −80° C. freezer for storage.

[0752] GFP Expression in Target Tissues-Hind limbs (paired) were thawed at room temperature and imaged in an IVIS bioluminescence imaging system (Lumina III; Perkin Elmer). GFP fluorescence was quantified using excitation at 488 nm and measuring emission at 510 nm. A total of 4 mice were evaluated at each time point (3 days, 5 days and 7 days). Tissues from the remaining 6 animals at each time point were retained for subsequent confirmation of viral burden using real-time PCR.

[0753] Results—As can be seen in FIG. 3, there was high-level expression of GFP within injected knee joints at 3 days post-injection. Viral loads decreased slightly at 5 days, then rose again to 7 days. With the limited sample size in this pilot study there was no significant difference between the behaviours of AAV-5 and AAV-6.

[0754] Discussion—The data from this study support the use of either AAV-5 or AAV-6 for intra-articular delivery of CRISPR-Cas9 into the mouse knee joint. The levels of both viral serotypes increased from 5 to 7 day, leaving open the possibility that they may have increased further if the follow-up had been extended to 2 or maybe 3 weeks. Additional work would be needed to confirm this, but the data thus far would suggest that there should be an interval of at least one week before the injection of the vector and challenge with intra-articular monoiodoacetate (MIA) crystals.

[0755] Background & Rationale—The monoiodoacetate (MIA)-induced OA model is used in this work for two reasons. First, natural (spontaneous) OA is extremely uncommon in mice, whereas the injection of MIA results in an induced model of OA that is relatively fast in onset, predictable and that provides good clinical correlation to the disease phenotype see in human OA patients, including intra-articular inflammation, pain and cartilage degeneration. Second, in contrast with surgical models such as destabilization of the medial meniscus (DMM) and transection of the anterior cruciate ligament (ACLT), the MIA model does not involve surgical incision of the joint capsule, making it much more relevant to the capsules of human patients with OA.

[0756] Injection of MIA crystals in rodents reproduces OA-like lesions and functional impairment that can be analyzed and quantified by techniques such as behavioral testing and objective lameness assessment. MIA is an inhibitor of glyceraldehyde-3-phosphatase and the resulting alterations in cellular glycolysis eventual cause the death of cells within the joint, including chondrocytes. Chondrocyte death manifests as cartilage degeneration and alterations in proteoglycan staining. Mice injected with MIA usually exhibit pain-like behavior within 72 hours, and cartilage loss by around 4 weeks post-injection. Increases in IL-1 expression have been documented within 2-3 days of injection in rats and in mice.

[0757] Study Design-Mice are injected unilaterally with either MIA or the saline vehicle control (one joint per animal). Within each group, half of the animals are pre-treated with the AAV-CRISPR-Cas9 vector targeting the mouse IL-1 beta gene, and the other half are injected with an AAV-CRISPR-Cas9 scrambled control. Animals from both groups will be taken off study at one of two time points: an early time point of 48 hours, to allow for assessment of the impact of therapy on the levels of IL-1 within the synovial fluid, and a late time point of 4 weeks to allow for assessment of the impact of therapy on cartilage breakdown and histological evidence of osteoarthritis.

### Methods

[0758] Experimental Animals—A total of 80 mice are used in this study. The experimental procedures are reviewed and approved by the local IACUC. Mice are housed in micro-isolator cages, fed a standard laboratory animal diet, and allowed access to water ad libitum.

[0759] MIA Model & Anti-IL1 Therapy—Mice are acclimated for a period of 7 days ahead of the study. On the first day of the study, mice are anaesthetized with an inhaled mixture of isoflurane in oxygen. Once a surgical plane of anesthesia has been confirmed, the right hind limb is clipped and the skin scrubbed with a surgical antiseptic. 40 mice (Treated) receive an intra-articular injection of the AAV-CRISPR-Cas9 vector targeting IL-1, and the remaining 40 animals (Control) are injected intra-articularly with the AAV-CRISPR-Cas9 scrambled control. Seven days later, half of the animals in each group are injected in the same joint with MIA and half with the saline vehicle. This leads to the establishment of four study groups:
[0760] Group 1: Treated-MIA (20 mice)
[0761] Group 2: Control-MIA (20 mice)
[0762] Group 3: Treated-Vehicle (20 mice)
[0763] Group 4: Control-Vehicle (20 mice)

[0764] Ten mice per group are euthanised 48 hours after the MIA challenge in order to document IL-1 levels in the knee joint. The remaining animals will be housed for 4 weeks in order to evaluate the effects of therapy on pain behavior (behavioral testing, including von Frey testing), lameness (limb use), joint swelling (caliper measurement) and joint pathology (histopathology).

[0765] Euthanasia & Tissue Collection-Mice are killed by exsanguination, followed by cervical dislocation. Joints are opened and either flushed for IL-1 measurement (48-hour group) or immersion fixed in 10% formalin for decalcified histopathology (4-week group).

### Example 5. Efficacy of AAV-6 and AAV-5 Mediated CRISPR Treatment in MSU-Crystal Induced Joint Arthritis in Mice

### Introduction and Objectives

[0766] The objective of these studies is to identify compounds/proteins that inhibit the inflammation induced by monosodium urate (MSU) crystal induced release of interleukin 1J3 (IL-1J3). This is a simple prescreen that identifies anti-inflammatory activity of various types of anti-inflammatory agents, especially IL-1 pathway blockers like interleukin receptor antagonists or antibodies that block IL-1 or IL1R1 (Torres R, et al. Hyperalgesia, synovitis and multiple biomarkers of inflammation are suppressed by interleukin 1 inhibition in a novel animal model of gouty arthritis. Ann Rheym Dis. 2009; 68(10):1602-1608, which is incorporated by reference herein in its entirety for all purposes). Gout is the most common form of inflammatory arthritis and is increasing in prevalence worldwide (Roddy E and Doherty M. Epidemiology of Gout. Arthritis Research & Therapy. 2010; 12(6):223, which is incorporated by reference herein in its entirety for all purposes). Gouty arthritis is characterized by increased serum urate concentration and deposits of monosodium urate crystals (MSU) in and around the joints, leading to swollen joints and severe pain (Sabina E P, Chandel S, and Rasool M K. Inhibition of monosodium urate crystal-induced inflammation by withaferin A. J Pharm Pharmaceut Sci. 2008; 11(4):46-55, which is incorporated by reference herein in its entirety for all purposes). Current treatments include nonsteroidal anti-inflammatory drugs (NSAIDs), steroids, or colchicine. For some patients these treatments may not be effective in treating gout or have adverse side effects (Sabina, 2008; Getting S J, et al. Activation of melanocortin type 3 receptor as a molecular mechanism for adrenocorticotropic hormone efficacy in gouty arthritis. Arthritis & Rheumatism. 2002; 46(10):2765-2775, which is incorporated by reference herein in its entirety for all purposes). The MSU-induced inflammation model provides a good, simple screening tool for identifying compounds that may have activity in the more complex disease process, such as systemic arthritis and more complex IL-1 driven diseases.

[0767] A study was conducted to evaluate the efficacy of adeno-associated virus (AAV)-mediated CRISPR therapy in monosodium urate (MSU) crystal induced inflammation in mice. On study day 0, male C57BL/6 mice were dosed into the right knee with a single (1×) intra-articular (IA) injection of placebo control (diluent, phosphate buffered saline [PBS]), a mixture of two variants of AAV-6 (one carrying Guide RNA 1 and the other carrying Guide RNA 2, 5×109 virus genome [vg] copies per mL), a mixture of two variants of AAV-5 (Guide 1+Guide 2, 5×109 vg/mL), the scrambled AAV-6 control (carrying non-targeting guide RNA, 1×1010 vg/mL), or the scrambled AAV-5 control (1×1010 vg/mL). On study day 7, the mice were given injections into right knee (same joint as treatment) with MSU crystals (25 mg/mL: 250 μg in 10 μL PBS). The mice were euthanized for necropsy approximately 6 hours post-MSU injection on study day 7. Efficacy evaluation was based on animal body weights, von Frey testing, and knee caliper measurements.

[0768] Mice treated IA (1× on day 0) with AAV-6 (Guide 1+2: 5×109 vg/guide per knee) showed a statistically significant reduction in referred pain, as measured by von Frey testing, 6 hours after MSU injection on day 7 as compared to mice injected IA with AAV-5 scramble vector (p=0.025) with results being nearly significant as compared to the AAV-6 scramble vector and PBS control groups (p=0.051 and p=0.075, respectively). Area under the curve (AUC) calculations for von Frey assessments did not differ statistically across groups. Animal body weight gain and knee swelling did not differ statistically across groups (Table 7). All animals survived to study termination.

TABLE 7
Summary of Data

| | | von Frey Absolute | Knee Caliper Change |
|---|---|---|---|
| | | Threshold AUC | from Baseline AUC |
| | | (day −1 | (day −1 |
| Group Treatment | | to 7) - Right Foot | to 7) - Right Knee |
| 1 | AAV-6 Scramble Vector (1 × 10¹⁰ | 5.92 (0.39) | 0.02 (0.01) |
| | particles/knee), IA, 1× (d 0) | | |
| 2 | AAV-6 Guide 1 + 2 (5 × 10⁹ | 6.01 (0.36) | 0.01 (0.01) |
| | of each guide/knee), IA, 1× (d 0) | | |
| 3 | PBS, IA (d 0) | 6.12 (0.33) | 0.02 (0.01) |
| 4 | AAV-5 Scramble Vector (1 × 10¹⁰ | 5.09 (0.31) | 0.02 (0.01) |
| | particles/knee), IA, 1× (d 0) | | |
| 5 | AAV-5 Guide 1 + 2 (5 × 10⁹ | 5.73 (0.39) | 0.02 (0.01) |
| | of each guide/knee), IA, 1× (d 0) | | |

Values represent group means and standard errors (SE)
PBS=Phosphate buffered saline control, AAV=adeno-associated virus, AUC=Area under the curve
*<0.05 ANOVA (Tukey's post-hoc) vs. AAV-6 Guide 1
^{†}p<0.05 ANOVA (Tukey's post-hoc) vs. PBS
^{‡}p<0.05 ANOVA (Tukey's post-hoc) vs. AAV-5 Scramble Vector
^{§} p<0.05 ANOVA (Tukey's post-hoc) vs. AAV-5 Guide 1

[0769] Summary of Clinical Outcomes-No significant differences were observed between groups over time. No clinical evidence that virus injection provoked a response greater than that seen in the vehicle group. No clinical evidence that virus injection altered the effects of MSU on joint swelling. Specific role of IL-1 in MSU-induced inflammation is unclear, so lack of clinical effect may not be unexpected.

[0770] Summary of qPCR-qPCR data confirm that CRISPR editing with AAV-6 or AAV-5 is effective in restoring IL-1 beta mRNA expression to normal levels. Statistical significance is hard to demonstrate given the sample size Confirmation of this effect can be obtained through IHC analysis of synovial tissues.

### Regulatory Compliance

[0771] This study was conducted in accordance with the test facility standard operating procedures (SOPs), the World Health Organization Quality Practices in Basic Biomedical Research guidelines, and in compliance with all state and federal regulations, including USDA Animal Welfare Act 9 CFR Parts 1-3. Federal Register 39129, Jul. 22, 1993.

### Institutional Animal Care and Use

[0772] This study was conducted in accordance with The Guide for the Care & Use of Laboratory Animals (8th Edition). No acceptable alternative test systems were identified for the animals used in this study.

### Materials and Methods

### Test Article Identification and Preparation

[0773] AAV vectors were pre-formulated as a viral particle suspension (>5×10¹² virus genome [vg] copies per mL) in frozen aliquots. The aliquots were stored at −80° C. and reconstituted in diluent (sterile filtered PBS [Corning, lot No. 01420007]) immediately before use. Standard biosafety level 2 (BSL-2) handling was used by personnel handling the AAV vectors prior to injection. The AAV scramble controls were prepared in sterile PBS to form working stocks containing 1×10¹² vg/mL for IA injection at 10 μL/knee to deliver 1×10¹⁰ vg of the scramble control into the knee joint. The active AAV vectors were prepared by mixing equal parts of each of the two active AAV-5 or AAV-6 constructs with sterile PBS to form working stocks containing 5×10¹¹ vg/mL for each of the two guides. The active AAV formulations were injected IA at 10 μL/knee to deliver 5×10⁹ vg of each of the two guides into the knee joint. See the study protocol (Appendix B) for further details of test article preparation, storage, and handling.

[0774] The AAV vectors were identified as follows:

AAVPrimeTM Adeno-Associated Virus - Serotype6 (AAV-6)
Particles for sgRNA (GeneCopoeia ™, catalog
No. AA06-MCP001682-AD01-2-200-a, lot No. GC03182K2001)
AAVPrimeTM Adeno-Associated Virus - Serotype6 (AAV-6)
Particles for sgRNA (GeneCopoeia ™, catalog
No. AA06-MCP001682-AD01-2-200-b, lot No. GC03202K2001)
AAVPrimeTM Adeno-Associated Virus - Serotype6 (AAV-6)
Particles for sgRNA (GeneCopoeia ™, catalog
No. AA06-CCPCTR01-AD01-200, lot No. GC03112K2002)
AAVPrimeTM Adeno-Associated Virus - Serotype5 (AAV-5)
Particles for sgRNA (GeneCopoeia ™, catalogue
No. AA05-MCP001682-AD01-2-200A, lot No. GC03182K2002)
AAVPrimeTM Adeno-Associated Virus - Serotype5 (AAV-5)
Particles for sgRNA (GeneCopoeia ™, catalogue
No. AA05-MCP001682-AD01-2-200B, lot No. GC03182K2003)
AAVPrimeTM Adeno-Associated Virus - Serotype5 (AAV-5)
Particles for sgRNA (GeneCopoeiaTM, catalogue
No. AA05-CCPCTR01-AD01-200, lot No. GC03032K2003)

[0775] Monosodium urate (MSU) crystals were obtained from Invivogen (catalogue No. Tlr1-25-MSU, lot No. MSU-42-01). MSU crystals were prepared at 25 mg/mL in PBS (without Ca or Mg: Corning, catalogue No. 21-031-CV, lot No. 31719003) in a plastic tube, vortexed for approximately 1 minute, sonicated for approximately 15 to 20 minutes, and vortexed before pipetting and use.

### Test System

| | |
|---|---|
| Number of animals: | 75 (70 + 5 extra) |
| Species/Strain or Breed: | C57BL/6 |
| Vendor: | Jackson |
| Age/Wt at Arrival: | 8-10 weeks old (~20 grams) |
| Gender: | Male |
| Age/Wt Range at Study Initiation: | At least 9 weeks by study initiation |
| Acclimation: | Will be acclimated for at least 3 |
| | days after arrival at BBP |
| Housing: | 3-5 animals/cage |

[0777] Male C57BL/6 mice (N=70+4 extra) that were 8 to 10 weeks of age were obtained from The Jackson Laboratory (Bar Harbor, ME). The mice weighed approximately 20 to 29 grams (mean of approx. 25 g) at enrollment on study day −1.

[0778] Animals were identified by color-coded dots at the base of the tail delineating animal number. After enrollment, all cages were labeled with protocol number, group number, and animal numbers.

### Environment and Husbandry

[0779] Upon arrival, the animals were housed 3 to 5 per cage in polycarbonate cages with corncob bedding and suspended food and water bottles. The mice were housed in individually ventilated pie cages (passive airflow, approximately 0.045-0.048 m2 floor space). Animal care including room, cage, and equipment sanitation conformed to the guidelines cited in the Guide for the Care and Use of Laboratory Animals (Guide, 2011) and the applicable BBP SOPs.

[0780] The animals were acclimated for 9 days prior to being paced in the study. An attending veterinarian was on site or on call during the live phase of the study. No concurrent medications were given.

[0781] During the acclimation and study periods, the animals were housed in a laboratory environment with temperatures ranging 19° C. to 25° C. and relative humidity of 30% to 70%. Automatic timers provided 12 hours of light and 12 hours of dark. The animals were allowed access ad libitum to Envigo Teklad 8640 diet fresh municipal tap water.

### Study Design

[0782] On study day −1, the animals were randomized by body weight into treatment groups, knees were shaved, and baseline knee caliper measurements were taken. On study day 0, the animals were dosed with treatments (IA into the right knee) as indicated in Table 8. On study day 7, the animals were given IA injections of MSU crystals (a total of 10 μL, 250 μg of MSU) into right knees (same knee as treatments). Body weight measurements were taken as described. Referred pain was measured by von Frey testing at 5 time points as described. Caliper measurements of right knees were taken at 5 time points as described. The animals were euthanized for necropsy following the final behavioral testing on day 7, as described.

TABLE 8
Group and Treatment Information

| | | | | Dose Level | Dose | Dose Conc. | | |
|---|---|---|---|---|---|---|---|---|
| Grp | N | MSU | Treatment | (particles/knee) | Vol. | (particles/mL) | Dose Route | Regimen |
| 1 | 14 | Yes | AAV-6 | 1 × 10¹⁰ | 10 μL | 1 × 10¹² | IA (right knee) | 1x (Day 0) |
| | | | Scramble Vector | | | | | |
| 2 | 14 | Yes | AAV-6 | 5 × 10⁹ (of | 10 μL | 1 × 10¹² | IA (right knee) | 1x (Day 0) |
| | | | Guide 1 + 2 | each guide) | | | | |
| 3 | 14 | Yes | PBS | — | 10 μL | — | IA (right knee) | 1x (Day 0) |
| 4 | 14 | Yes | AAV-5 | 1 × 10¹⁰ | 10 μL | 1 × 10¹² | IA (right knee) | 1x (Day 0) |
| | | | Scramble Vector | | | | | |
| 5 | 14 | Yes | AAV-5 | 5 × 10⁹ (of | 10 μL | 1 × 10¹² | IA (right knee) | 1x (Day 0) |
| | | | Guide 1 + 2 | each guide) | | | | |

### Disease Induction

[0783] MSU crystals were prepared at a concentration of 25 mg/mL in sterile PBS. Crystals did solubilize, and injection preparation was carefully mixed prior to use. 10 μL of MSU crystal solution was injected into the right knee joint.

Unformulated MSU Storage Conditions: Room temperature, protected
from light
Vehicle: PBS
Dose Route: IA into the right knee
Dose Volume: 10 uL per knee
MSU Formulation Instructions & Calculations: 0.01 ml/knee * 75
animals = 0.72 ml of 25 mg/ml MSU needed, minimum
MSU Storage & Stability: Stored in glass. Prepared just prior to dosing.
Vortexed before injecting
MSU Disposition Following Dosing: Formulations discarded after dosing.
Unformulated stock retained.

### Body Weight Measurements and Live Phase Sampling

[0784] The mice were weighed on study day −1 (pre-injection) for randomization, and body weights were measured again on study days 2 and 6. Animal body weight measurements can be found in Table 9.

TABLE 9
Body Weight and Dose Calculation Data (MGA-UCM-2)

| Treatment Group | | | | | | | |
|---|---|---|---|---|---|---|---|
| Group 1 | | | | | | | |
| AAV-4 Scramble [symbol] | | | Day 2 | | Day 6 | | |
| (1 × 10\hat{ }10 | Day −1 | Day 0 | | Body Wt. | | Body Wt. | Change in |
| particles/knee) | Body Wt. | Dose Vol. | Body Wt. | % Δ from | Body Wt. | % Δ from | Body Weight |
| IA, 1x (D 0) | (g) | 10 μl (ml) | (g) | Baseline | (g) | Baseline | Day −1 to 6 |
| 1 | 25.99 | 0.01 | 24.19 | −6.9% | 24.67 | −6.1% | −1 |
| 2 | 25.00 | 0.01 | 24.64 | −1.4% | 25.32 | 1.3% | 0 |
| 3 | 23.50 | 0.01 | 24.61 | 4.7% | 24.95 | 6.2% | 1 |
| 4 | 23.92 | 0.01 | 23.14 | −3.3% | 23.81 | −0.5% | 0 |
| 5 | 23.30 | 0.01 | 23.14 | −0.7% | 23.78 | 2.1% | 0 |
| 6 | 23.04 | 0.01 | 23.97 | 4.0% | 24.51 | 6.4% | 1 |
| 7 | 27.44 | 0.01 | 28.10 | 2.4% | 27.90 | 1.7% | 0 |
| 8 | 22.79 | 0.01 | 22.83 | 0.2% | 23.59 | 3.5% | 1 |
| 9 | 24.80 | 0.01 | 24.74 | −0.2% | 25.71 | 3.7% | 1 |
| 10 | 27.46 | 0.01 | 27.97 | 1.9% | 28.66 | 4.4% | 1 |
| 11 | 26.50 | 0.01 | 26.57 | 0.3% | 26.88 | 1.4% | 0 |
| 12 | 26.51 | 0.01 | 26.48 | −0.1% | 27.78 | 4.8% | 1 |
| | 22.80 | 0.01 | 23.38 | 2.3% | 23.77 | 4.3% | 1 |
| 14 | 24.77 | 0.01 | 24.60 | −0.7% | 24.99 | 0.5% | 0 |
| Extra | 21.95 | 0.01 | 22.56 | 2.8% | 23.34 | 6.3% | 1 |
| Mean | 24.84 | | 24.88 | 0.19% | 25.4 | 2.47% | 0.6 |
| SE | 0.45 | | 0.5 | 0.80% | 0.5 | 0.80% | 0.2 |
| ANOVA (Tukey's post- | | | | | | | 0.684 |
| hoc) vs. Group 2 | | | | | | | |
| ANOVA (Tukey's post- | | | | | | | 0.243 |
| hoc) vs. Group 3 | | | | | | | |
| ANOVA (Tukey's post- | | | | | | | 0.212 |
| hoc) vs. Group 4 | | | | | | | |
| ANOVA (Tukey's post- | | | | | | | 0.543 |
| hoc) vs. Group 5 | | | | | | | |

| Group 2 | | | | | | | |
|---|---|---|---|---|---|---|---|
| AAV-4 Guide 1 + 2 | | | | | | | |
| ( [symbol] of each | Day −1 | Day −1 | Day 2 | | Day 6 | | Change in |
| guide/knee) | Body Wt. | Dose Vol. | Body Wt. | Body Wt. % Δ | Body Wt. | Body Wt. % Δ | Body Weight |
| IA, 1x (D 0) | (g) | 10 μl (ml) | (g) | Baseline | (g) | Baseline | Day −1 to 6 |
| 1 | 22.56 | 0.01 | 22.47 | −0.4% | 22.92 | 1.6% | 0 |
| 2 | 28.49 | 0.01 | 29.00 | 1.8% | 29.08 | 2.1% | 1 |
| 3 | 24.65 | 0.01 | 24.65 | 0.0% | 25.06 | 1.7% | 0 |
| 4 | 23.63 | 0.01 | 23.29 | −1.4% | 24.05 | 1.8% | 0 |
| 5 | 22.78 | 0.01 | 23.19 | 1.8% | 24.14 | 6.0% | 1 |
| 6 | 27.32 | 0.01 | 27.60 | 1.0% | 28.54 | 4.5% | 1 |
| 7 | 26.83 | 0.01 | 27.49 | 2.5% | 28.00 | 4.4% | 1 |
| 8 | 26.96 | 0.01 | 26.84 | −0.4% | 28.79 | 6.5% | 2 |
| 9 | 22.80 | 0.01 | 22.88 | 0.4% | 23.66 | 1.8% | 1 |
| 10 | 22.45 | 0.01 | 23.12 | 3.0% | 23.80 | 6.3% | 1 |
| 11 | 24.83 | 0.01 | 24.53 | −1.2% | 25.42 | 2.4% | 1 |
| 12 | 25.80 | 0.01 | 26.11 | 1.2% | 26.56 | 2.9% | 1 |
| 13 | 25.30 | 0.01 | 25.59 | 1.1% | 26.14 | 3.3% | 1 |
| 14 | 23.45 | 0.01 | 23.88 | 1.8% | 24.14 | 2.9% | 1 |
| Extra | 25.84 | 0.01 | 26.43 | 2.3% | 26.29 | 1.3% | 0 |
| Mean | 24.85 | | 25.05 | 0.79% | 25.7 | 3.57% | 0.9 |
| SE | 0.53 | | 0.56 | 0.36% | 0.6 | 0.46% | 0.1 |
| ANOVA (Tukey's post- | | | | | | | 0.940 |
| hoc) vs. Group 3 | | | | | | | |
| ANOVA (Tukey's post- | | | | | | | 0.919 |
| hoc) vs. Group 4 | | | | | | | |
| ANOVA (Tukey's post- | | | | | | | 0.999 |
| hoc) vs. Group 5 | | | | | | | |
| Treatment Group | | | | | | | |
| Group 3 | Day −1 | [symbol] | Day 2 | | Day 6 | | Change to |
| PBS | Body Wt. | Dose Vol. | Body Wt. | Body Wt. % Δ | Body Wt. | Body Wt. % Δ | Body Weight |
| IA, 1x (D 0) | (g) | 10 μl (ml) | (g) | Baseline | (g) | Baseline | Day −1 to 6 |
| 1 | 27.14 | 0.0 [symbol] | 28.19 | 3.9% | 29.16 | 7.0% | 2 |
| 2 | [symbol] | 0.0 [symbol] | 25.11 | [symbol] | 26. [symbol] | 4.1% | 1 |
| 3 | 24.72 | 0.0 [symbol] | 25.03 | 1. [symbol] % | 25.41 | 2. [symbol] % | 1 |
| 4 | 28.33 | 0.0 [symbol] | 29.94 | 1.8% | 29.62 | 3.8% | 1 |
| 5 | 25.50 | 0.0 [symbol] | 25. [symbol] | 1.9% | 26.15 | [symbol] | 1 |
| 6 | 25.23 | 0.0 [symbol] | 25. [symbol] | 0.3% | 26.00 | 3.1% | 1 |
| 7 | 25.45 | 0.0 [symbol] | 25. [symbol] | 1.4% | 26.42 | 3.8% | 1 |
| 8 | 25.80 | 0.0 [symbol] | 26.48 | 2.6% | 26.83 | 4.0% | 1 |
| 9 | 24.77 | 0.0 [symbol] | [symbol] | 3.3% | 26.24 | 5.9% | 1 |
| 10 | 19.83 | 0.0 [symbol] | 26.15 | 1.6% | 21.33 | 7.1% | 1 |
| 11 | 25.06 | 0.0 [symbol] | 26.30 | 2.5% | 27.14 | 5.8% | 1 |
| 12 | 24.27 | 0.0 [symbol] | 24.58 | 1.3% | 25.02 | 3.1% | 1 |
| 13 | 29. [symbol] | 0.0 [symbol] | 26.71 | 4.3% | 21.23 | [symbol] | 1 |
| 14 | 24.74 | 0.0 [symbol] | 24.38 | 0.9% | 24.92 | 0.7% | 0 |
| Mean | [symbol] | | [symbol] | 1.77% | 25.8 | [symbol] | 1.1 |
| SE | 0.62 | | 0.63 | 0.36% | 0.6 | 0.51% | 0.1 |
| ANOVA (Tukey's post- | | | | | | | [symbol] |
| hoc) vs. Group 4 | | | | | | | |
| ANOVA (Tukey's post- | | | | | | | 0.983 |
| hoc) vs. Group 5 | | | | | | | |
| Group 4 | | | | | | | |
| AAV- [symbol] Scramble Vector | | | | | | | |
| (1 × 10\hat{ }10 | Day −1 | [symbol] | Day 2 | | Day 6 | | Change to |
| particles/knee) | Body Wt. | Dose Vol. | Body Wt. | Body Wt. % Δ | Body Wt. | Body Wt. % Δ | Body Weight |
| IA, 1x (D 0) | (g) | 10 μl (ml) | (g) | Baseline | (g) | Baseline | Day −1 to 6 |
| 1 | 25.00 | 0.0 [symbol] | 29. [symbol] | 2.7% | 26.31 | 6.0% | 2 |
| 2 | 28.90 | 0.0 [symbol] | 29. [symbol] | 7.6% | 30.50 | 6.9% | 2 |
| 3 | 25.17 | 0.0 [symbol] | 24.41 | 0.2% | 25.52 | 0. [symbol] % | 0 |
| 4 | 23.46 | 0.0 [symbol] | 23.93 | 2.0% | 24.23 | 5.4% | 1 |
| 5 | 24.96 | 0.0 [symbol] | 25.37 | 1.0% | 26.16 | 4.8% | 1 |
| 6 | 26.95 | 0.0 [symbol] | 29.27 | 1.2% | 27.89 | 3. [symbol] % | 1 |
| 7 | 24. [symbol] | 0.0 [symbol] | 25. [symbol] | 0.3% | 25.63 | 2.6% | 1 |
| 8 | 24.52 | 0.0 [symbol] | 24.69 | 0.3% | 25.18 | 3.5% | 1 |
| 9 | 34.56 | 0.0 [symbol] | 27.69 | 9.0% | 27.21 | 10.1% | 3 |
| 10 | 24.62 | 0.0 [symbol] | 26. [symbol] | 5.5% | 26.11 | 6.1% | 1 |
| 11 | 23.73 | 0.0 [symbol] | 24. [symbol] | 1.4% | 23.88 | 0.6% | 0 |
| 12 | 23.41 | 0.0 [symbol] | 24. [symbol] | 2. [symbol] % | 24.89 | 6.2% | 1 |
| 13 | 22.63 | 0.0 [symbol] | [symbol] | −0.1% | 21.68 | 2.0% | 0 |
| 14 | 25.50 | 0.0 [symbol] | 25.66 | 0. [symbol] % | 25.82 | 1.3% | 0 |
| Extra | 26.25 | 0.0 [symbol] | 26.58 | 1.3% | 26.28 | 0. [symbol] % | 0 |
| Mean | 24.91 | | 25.46 | 2.23% | 26.0 | 4.27% | 1.1 |
| SE | 0.42 | | 0.47 | 0.72% | 0.5 | 0.74% | 0.2 |
| ANOVA (Tukey's post- | | | | | | | 0.973 |
| hoc) vs. Group 5 | | | | | | | |

| Group 5 | | | | | | | |
|---|---|---|---|---|---|---|---|
| AAV- [symbol] Guide 1 + 2 | | | | | | | |
| ( [symbol] 10\hat{ }9 of | Day −1 | [symbol] | Day 2 | | Day 6 | | Change to |
| each guide/knee) | Body Wt. | Dose Vol. | Body Wt. | Body Wt. % Δ | Body Wt. | Body Wt. % Δ | Body Weight |
| IA,1x (D 0) | (g) | 10 μl (ml) | (g) | Baseline | (g) | Baseline | Day −1 to 6 |
| 1 | 25.57 | 0.0 [symbol] | 26.41 | 3.5% | 26.21 | 2. [symbol] % | 1 |
| 2 | 23.68 | 0.0 [symbol] | 23.37 | − [symbol] .7% | 24.18 | 2.1% | 1 |
| 3 | 24.28 | 0.0 [symbol] | 24.42 | [symbol] | 24.71 | 1.8% | 0 |
| 4 | 23.99 | 0.0 [symbol] | 23.31 | 1.9% | 24.18 | 4.7% | 1 |
| 5 | 24.52 | 0.0 [symbol] | 25.34 | 3.3% | 24.97 | 1.8% | 0 |
| 6 | 25. [symbol] | 0.0 [symbol] | 26.60 | 2.7% | 27.25 | 5.2% | 1 |
| 7 | 25.92 | 0.0 [symbol] | 26.98 | [symbol] | 26.28 | 1.4% | 0 |
| 8 | 25.32 | 0.0 [symbol] | 25.48 | [symbol] | 26.49 | 4.0% | 1 |
| 9 | 25.99 | 0.0 [symbol] | 27.51 | 5.8% | 27.36 | 5.4% | 1 |
| 10 | 27.50 | 0.0 [symbol] | 27.63 | 0.5% | 28.82 | 4.8% | 1 |
| 11 | 24.69 | 0.0 [symbol] | 25.54 | 3.4% | 25.46 | 4.7% | 1 |
| 12 | 24.15 | 0.0 [symbol] | 24.97 | 3.4% | 26.91 | 2.9% | 2 |
| 13 | 22.60 | 0.0 [symbol] | 23.90 | 1.7% | 22.99 | 1.7% | 0 |
| 14 | 23.96 | 0.0 [symbol] | 24.32 | 1.5% | 34.93 | 4. [symbol] | 1 |
| Extra | 24.78 | 0.0 [symbol] | 23.36 | 3.3% | 26.21 | 5.8% | 1 |
| Mean | 24. [symbol] | | 29.79 | 1.96% | 25.7 | 3.75% | 0.9 |
| SE | 0.35 | | 0.48 | 0.49% | 0.4 | 0.56% | 0.1 |

[symbol]

indicates data missing or illegible when filed

### Von Frey Methods

[0785] Von Frey analysis was performed on right hind paws at 5 time points: baseline (day −1), 6 hours post-dose (day 0), 24 hours post-dose (day 1), pre-MSU injection (0 h, day 7), and 6 hours post-MSU injection (day 7). The groups were blinded to the researcher during von Frey testing.

[0786] The von Frey method evaluates mechanical allodynia (pain due to a stimulus that does not normally provoke pain) based on the response of animals to the application of calibrated filaments (Bioseb, Vitrolles, France) to the foot. The filaments are identified by a number representing log 10 of the force in milligrams×10. The animals are habituated to the testing rack three times (45 to 60 minutes) prior to baseline evaluation. When testing, the von Frey hair is placed on the surface of the hind paw and pushed smoothly until the hair has a significant bend in it; the hair is pressed against the paw for six seconds. Responses are recoded as either a 0 (no response) or a 1 (response). A response is defined as lifting the hind paw away from the hair, jerking the leg away, walking away from the hair, etc. The starting hair is 3.22, if the animal responds the tester moves down to 2.83, if there is no response to the 3.22 hair then the tester moves up to 3.61; the tester continues to test hairs based on the response and moves up or down, as appropriate. The hair increments are as follows: 1.65, 2.36, 2.44, 2.83, 3.22, 3.61, 3.84, 4.08, 4.17. Each paw is tested 5 times, moving up and down between hairs until the final filament is reached. Data is entered into a spreadsheet and used to translate the response rate into a paw withdraw threshold. Results of testing are converted to an absolute threshold (50% response rate) in grams, using the formula 10(x+yz)/10000, where x equals the log unit value of the final tested filament, y equals the tabular value for the response pattern from Dixon's up-and-down method for small samples (Dixon, 1965), and z equals the average interval between filament values. Testing is done on the hind portions of the hind paw as the heel tends to give a more reliable and sensitive response. The testers monitor the animals for hyper-responding or freezing, in which case the animals are left alone until calm. Von Frey data can be found in Table 10.

TABLE 10
von Frey Data (MGA-UCM-2)

| Treatment Group | | | | | | | | | | | |
|---|---|---|---|---|---|---|---|---|---|---|---|
| Group 1 | | | | | | | | | | | |
| AAV-6 Scramble Vector | Day −1 | | Day 0.25 | | Day 1 | | Day 7 | | Day 7.25 | | |
| (1 × 10\hat{ }10 particles/knee) | Absolute Threshold | | Absolute Threshold | | Absolute Threshold | | Absolute Threshold | | Absolute Threshold | | Day −1-7 |
| IA, 1x (D 0) | Log units | (g) | Log units | (g) | Log units | (g) | Log units | (g) | Log units | (g) | AUC |
| 1 | 3.72500 | 0.53 | 3.96000 | 0.91 | 3.96000 | 0.91 | 3.72300 | 0.53 | 3.72500 | 0.53 | 6.05 |
| 2 | 3.96000 | 0.91 | 3.72500 | 0.53 | 3.72500 | 0.53 | 4.12300 | 1.33 | 3.41500 | 0.26 | 7.09 |
| 3 | 3.72500 | 0.53 | 3.82500 | 0.11 | 3.82500 | 0.11 | 3.96000 | 0.91 | 3.41500 | 0.26 | 3.68 |
| 4 | 3.96000 | 0.91 | 3.96000 | 0.91 | 3.96000 | 0.91 | 3.96000 | 0.91 | 3.63500 | 0.04 | 7.42 |
| 5 | 3.72500 | 0.53 | 3.82500 | 0.53 | 3.82500 | 0.11 | 3.32500 | 0.53 | 3.41500 | 0.26 | 2.91 |
| 6 | 3.96000 | 0.91 | 3.72500 | 0.53 | 3.96000 | 0.91 | 3.96000 | 0.91 | 3.82300 | 0.11 | 7.04 |
| 7 | 4.12500 | 1.33 | 3.72500 | 0.53 | 3.41500 | 0.26 | 3.72500 | 0.53 | 3.41500 | 0.26 | 3.93 |
| 8 | 3.96000 | 0.91 | 3.96000 | 0.91 | 3.96000 | 0.91 | 3.96000 | 0.91 | 3.41500 | 0.26 | 7.44 |
| 9 | 3.72500 | 0.53 | 3.72600 | 0.53 | 3.96000 | 0.91 | 3.72500 | 0.53 | 3.41500 | 0.26 | 5.63 |
| 10 | 3.98000 | 0.91 | 3.96000 | 0.91 | 3.96000 | 0.91 | 3.96000 | 0.91 | 2.63500 | 0.04 | 7.42 |
| 11 | 3.96000 | 0.91 | 3.96000 | 0.91 | 3.72500 | 0.53 | 3.96000 | 0.91 | 3.82500 | 0.11 | 6.14 |
| 12 | 4.12500 | 1.33 | 3.72500 | 0.53 | 3.72500 | 0.53 | 3.96000 | 0.91 | 3.41500 | 0.26 | 6.04 |
| 13 | 3.96000 | 0.91 | 3.72500 | 0.53 | 3.72500 | 0.53 | 3.96000 | 0.91 | 2.63500 | 0.04 | 6.75 |
| 14 | 3.96000 | 0.91 | 3.96000 | 0.91 | 3.96000 | 0.91 | 3.72500 | 0.53 | 3.72500 | 0.53 | 6.29 |
| Extra | 4.12500 | 1.33 | 3.41500 | 0.26 | 3.41500 | 0.26 | 4.12500 | 1.33 | 3.02500 | 0.11 | 6.75 |
| Mean | | 0.86 | | 0.66 | | 0.64 | | 0.81 | | 0.23 | 5.32 |
| SE | | 0.07 | | 0.07 | | 0.08 | | 0.06 | | 0.04 | 0.39 |
| ANOVA (Tukey's post- | | 0.979 | | 0.917 | | 1.000 | | 0.974 | | 0.051 | 1.000 |
| hoc) vs Group 2 | | | | | | | | | | | |
| ANOVA (Tukey's post- | | 0.998 | | >0.9999 | | >0.9999 | | 0.987 | | >0.9999 | 0.994 |
| hoc) vs Group 3 | | | | | | | | | | | |
| ANOVA (Tukey's post- | | 0.999 | | 0.943 | | 0.493 | | 0.956 | | 0.987 | 0.478 |
| hoc) vs Group 4 | | | | | | | | | | | |
| ANOVA (Tukey's post- | | 0.984 | | 0.873 | | 0.995 | | 0.998 | | 0.599 | 0.996 |
| hoc) vs. Group 5 | | | | | | | | | | | |

| Treatment Group | | | | | | | | | | | |
|---|---|---|---|---|---|---|---|---|---|---|---|
| Group 2 | | | | | | | | | | | |
| AAV-6 Guide 1 + 2 | Day -1 | | Day 0.25 | | Day 1 | | Day 7 | | Day 7.28 | | |
| (6 × 10\hat{ }9 of each | Absolute Threshold | | Absolute Threshold | | Absolute Threshold | | Absolute Threshold | | Absolute Threshold | | |
| guide/knee) | Log | | Log | | Log | | Log | | Log | | Day −1-7 |
| IA, 1x (D 0) | units | (g) | units | (g) | units | (g) | units | (g) | units | (g) | AUC |
| 1 | 3.96000 | 0.91 | 3.41500 | 0.26 | 3.72500 | 0.53 | 4.12500 | 1.33 | 3.41500 | 0.26 | 6.82 |
| 2 | 3.96000 | 0.91 | 3.02500 | 0.11 | 3.96000 | 0.91 | 3.72500 | 0.53 | 3.41500 | 0.26 | 5.45 |
| 3 | 3.72500 | 0.53 | 3.72500 | 0.53 | 3.41500 | 0.26 | 3.96000 | 0.91 | 3.72500 | 0.53 | 4.66 |
| 4 | 3.72500 | 0.53 | 3.96000 | 0.91 | 3.96000 | 0.98 | 3.96000 | 0.91 | 3.41500 | 0.26 | 7.20 |
| 5 | 3.96000 | 0.91 | 3.96000 | 0.91 | 3.96000 | 0.98 | 3.72500 | 0.53 | 3.72500 | 0.53 | 6.29 |
| 6 | 3.96000 | 0.91 | 3.96000 | 0.91 | 3.96000 | 0.93 | 4.12500 | 1.33 | 3.72500 | 0.53 | 8.79 |
| 7 | 4.12500 | 1.33 | 3.72500 | 0.53 | 3.72500 | 0.53 | 3.96000 | 0.91 | 3.96000 | 0.91 | 6.12 |
| 8 | 3.72500 | 0.53 | 3.41500 | 0.26 | 3.02500 | 0.33 | 3.96000 | 0.91 | 3.96000 | 0.91 | 3.91 |
| 9 | 4.12500 | 1.33 | 3.41500 | 0.26 | 3.96000 | 0.91 | 3.72500 | 0.53 | 3.72500 | 0.53 | 5.90 |
| 10 | 3.96000 | 0.91 | 3.96000 | 0.91 | 3.02500 | 0.33 | 3.96000 | 0.91 | 3.41500 | 0.26 | 4.72 |
| 11 | 3.96000 | 0.91 | 3.72500 | 0.53 | 3.72500 | 0.53 | 3.72500 | 0.53 | 3.72500 | 0.53 | 4.62 |
| 12 | 3.96000 | 0.91 | 3.96000 | 0.91 | 3.41500 | 0.26 | 3.96000 | 0.91 | 3.41500 | 0.26 | 5.24 |
| 13 | 3.96000 | 0.91 | 3.72500 | 8.53 | 3.96000 | 0.91 | 3.96000 | 0.91 | 3.02500 | 0.11 | 7.04 |
| 14 | 4.12500 | 1.33 | 3.72500 | 0.53 | 3.96000 | 0.91 | 3.96000 | 0.91 | 3.02500 | 0.53 | 7.36 |
| Extra | 3.72500 | 0.53 | 3.96000 | 0.91 | 3.72500 | 0.53 | 3.72500 | 0.53 | 3.41500 | 0.26 | 4.73 |
| Mean | | 0.92 | | 0.58 | | 0.62 | | 0.86 | | 0.46 | 6.01 |
| | | 0.07 | | 0.08 | | 0.09 | | 0.07 | | 0.06 | 0.36 |
| ANOVA (Tukey's post- | | 0.886 | | 0.941 | | >0.9999 | | 0.998 | | 0.075 | 1.000 |
| hoc) vs. Group 3 | | | | | | | | | | | |
| ANOVA (Tukey's post- | | 0.924 | | >0.9999 | | 0.639 | | 0.690 | | 0.025 | 0.369 |
| hoc) vs. Group 4 | | | | | | | | | | | |
| ANOVA (Tukey's post- | | 0.828 | | 1.000 | | 0.999 | | 0.999 | | 0.855 | 0.981 |
| hoc) vs. Group 5 | | | | | | | | | | | |
| Treatment Group | Day -1 | | Day 0.25 | | Day 1 | | Day 7 | | Day 7.25 | | |
| Group 3 | Absolute Threshold | | Absolute Threshold | | Absolute Threshold | | Absolute Threshold | | Absolute Threshold | | |
| PBS | Log | | Log | | Log | | Log | | Log | | Day −1-7 |
| IA, 1x (D 0) | units | (g) | units | (g) | units | (g) | units | (g) | units | (g) | AUC |
| 1 | 3.96000 | 0.91 | 3.41500 | 0.26 | 3.96000 | 0.91 | 4.12500 | 1.33 | 3.72500 | 0.53 | 8.14 |
| 2 | 3.96000 | 0.91 | 3.96000 | 0.91 | 3.96000 | 0.91 | 3.96000 | 0.91 | 2.63500 | 0.04 | 7.42 |
| 3 | 3.96000 | 0.91 | 3.72500 | 0.53 | 3.96000 | 0.91 | 3.96000 | 0.91 | 3.41500 | 0.26 | 7.06 |
| 4 | 3.72500 | 0.53 | 3.96000 | 0.91 | 3.96000 | 0.91 | 3.72500 | 0.53 | 2.63500 | 0.04 | 5.99 |
| 5 | 3.72500 | 0.53 | 3.96000 | 0.91 | 3.72500 | 0.53 | 3.96000 | 0.91 | 2.63500 | 0.04 | 5.89 |
| 6 | 3.96000 | 0.91 | 3.96000 | 0.91 | 3.96000 | 0.91 | 3.72500 | 0.53 | 3.41500 | 0.26 | 6.25 |
| 7 | 3.96000 | 0.91 | 3.72500 | 0.53 | 3.72500 | 0.53 | 3.96000 | 0.91 | 3.72500 | 0.53 | 5.81 |
| 8 | 4.12500 | 1.33 | 3.72500 | 0.53 | 3.41500 | 0.26 | 3.72500 | 0.53 | 3.41500 | 0.26 | 3.93 |
| 9 | 3.72500 | 0.53 | 3.41500 | 0.26 | 3.72500 | 0.53 | 3.96000 | 0.91 | 3.41500 | 0.26 | 5.27 |
| 10 | 3.96000 | 0.91 | 3.96000 | 0.91 | 3.72500 | 0.53 | 3.96000 | 0.91 | 3.72500 | 0.53 | 6.19 |
| 11 | 3.72500 | 0.53 | 3.72500 | 0.53 | 3.72500 | 0.53 | 3.72500 | 0.53 | 2.63500 | 0.04 | 4.32 |
| 12 | 3.96000 | 0.91 | 3.96000 | 0.91 | 3.72500 | 0.53 | 4.12500 | 1.33 | 3.02500 | 0.11 | 7.45 |
| 13 | 3.96000 | 0.91 | 3.72500 | 0.53 | 3.72500 | 0.53 | 4.12500 | 1.33 | 3.02500 | 0.11 | 7.07 |
| 14 | 3.96000 | 0.91 | 3.72500 | 0.53 | 3.41500 | 0.26 | 3.96000 | 0.91 | 3.41500 | 0.26 | 4.86 |
| Mean | | 0.83 | | 0.66 | | 0.63 | | 0.89 | | 0.23 | 6.12 |
| SE | | 0.06 | | 0.07 | | 0.06 | | 0.08 | | 0.05 | 0.33 |
| ANOVA (Tukey's post- | | >0.9999 | | 0.962 | | 0.400 | | 0.548 | | 0.985 | 0.259 |
| hoc) vs Group 4 | | | | | | | | | | | |
| ANOVA (Tukey's post- | | | | 0.901 | | 0.998 | | 0.983 | | 0.660 | 0.937 |
| hoc) vs. Group 5 | | | | | | | | | | | |
| Treatment group | | | | | | | | | | | |
| Group 4 | Day −1 | | Day 0.25 | | Day 1 | | Day 7 | | Day 7.25 | | |
| AAV-5 Scramble Vector | Absolute Threshold | | Absolute Threshold | | Absolute Threshold | | Absolute Threshold | | Absolute Threshold | | |
| (1 × 10\hat{ }10 particles/knee) | Log | | Log | | Log | | Log | | Log | | Day −1-7 |
| IA, 1x (D 0) | units | (g) | units | (g) | units | (g) | units | (g) | units | (g) | AUC |
| 1 | 3.72500 | 0.53 | 3.96000 | 0.91 | 3.72500 | 0.53 | 3.96000 | 0.91 | 3.41500 | 0.26 | 5.92 |
| 2 | 3.96000 | 0.91 | 3.72500 | 0.53 | 3.41500 | 0.26 | 3.72500 | 0.53 | 2.63500 | 0.04 | 3.64 |
| 3 | 3.72500 | 0.53 | 3.02500 | 0.11 | 3.72500 | 0.53 | 3.96000 | 0.91 | 3.41500 | 0.26 | 5.11 |
| 4 | 3.72500 | 0.53 | 3.72500 | 0.53 | 3.72500 | 0.53 | 3.72500 | 0.53 | 2.63500 | 0.04 | 4.32 |
| 5 | 4.12500 | 1.33 | 3.96000 | 0.91 | 3.72500 | 0.53 | 3.96000 | 0.91 | 3.41500 | 0.26 | 6.42 |
| 6 | 3.96000 | 0.91 | 3.96000 | 0.91 | 3.72500 | 0.53 | 3.72500 | 0.53 | 3.41500 | 0.26 | 4.97 |
| 7 | 3.96000 | 0.91 | 3.96000 | 0.91 | 3.72500 | 0.53 | 3.96000 | 0.91 | 2.62500 | 0.04 | 6.13 |
| 8 | 3.96000 | 0.91 | 3.96000 | 0.91 | 3.02500 | 0.11 | 3.72500 | 0.53 | 3.02500 | 0.11 | 3.51 |
| 9 | 3.96000 | 0.91 | 3.72500 | 0.53 | 3.96000 | 0.91 | 3.96000 | 0.91 | 2.63500 | 0.04 | 7.03 |
| 10 | 3.96000 | 0.91 | 3.72500 | 0.53 | 3.02500 | 0.11 | 3.72500 | 0.53 | 3.41500 | 0.26 | 3.15 |
| 11 | 4.12500 | 1.33 | 3.02500 | 0.11 | 3.72500 | 0.53 | 3.96000 | 0.91 | 3.72500 | 0.53 | 5.65 |
| 12 | 3.72500 | 0.53 | 3.43500 | 0.26 | 3.72500 | 0.53 | 3.96000 | 0.91 | 3.02500 | 0.11 | 5.28 |
| 13 | 3.72500 | 0.53 | 3.72500 | 0.53 | 3.72500 | 0.53 | 3.72500 | 0.53 | 3.72500 | 0.53 | 4.38 |
| 14 | 3.96000 | 0.91 | 3.72500 | 0.53 | 3.72500 | 0.55 | 3.96000 | 0.91 | 2.63500 | 0.04 | 5.75 |
| Extra | 3.96000 | 0.91 | 3.96000 | 0.91 | 3.72500 | 0.53 | 3.72500 | 0.53 | 3.41500 | 0.26 | 4.97 |
| Mean | | 0.84 | | 0.59 | | 0.48 | | 0.75 | | 0.20 | 5.09 |
| SE | | 0.07 | | 0.08 | | 0.05 | | 0.05 | | 0.05 | 0.31 |
| ANOVA (Tukey's post- | | 0.999 | | 0.999 | | 0.776 | | 0.869 | | 0.411 | 0.713 |
| hoc) vs. Group S | | | | | | | | | | | |

| Treatment Group | | | | | | | | | | | |
|---|---|---|---|---|---|---|---|---|---|---|---|
| Group 5 | Day −1 | | Day 0.25 | | Day 1 | | Day 7 | | Day 7.25 | | |
| AAV-5 Guite 1 + 2 | Absolute Threshold | | Absolute Threshold | | Absolute Threshold | | Absolute Threshold | | Absolute Threshold | | |
| (5 × 10\hat{ }9 of each guide/knee) | Log | | Log | | Log | | Log | | Log | | Day −1-7 |
| IA, 1x (D 0) | units | (g) | units | (g) | units | (g) | units | (g) | units | (g) | AUC |
| 1 | 3.72500 | 0.53 | 3.96000 | 0.91 | 3.96000 | 0.91 | 3.96000 | 0.91 | 3.41500 | 0.26 | 7.20 |
| 2 | 3.72500 | 0.53 | 3.41500 | 0.26 | 3.96000 | 0.91 | 3.96000 | 0.91 | 3.72500 | 0.53 | 6.59 |
| 3 | 4.12500 | 1.33 | 3.96000 | 0.91 | 3.72500 | 0.53 | 3.96000 | 0.91 | 3.96000 | 0.91 | 6.50 |
| 4 | 3.72500 | 0.53 | 0.02500 | 0.11 | 3.96000 | 0.91 | 3.72500 | 0.53 | 3.41500 | 0.26 | 5.21 |
| 5 | 3.72500 | 0.53 | 3.96000 | 0.91 | 3.96000 | 0.91 | 4.12500 | 1.33 | 3.96000 | 0.91 | 8.60 |
| 6 | 3.96000 | 0.91 | 3.96000 | 0.91 | 3.02500 | 0.11 | 3.72500 | 0.53 | 2.63500 | 0.04 | 3.50 |
| 7 | 3.72500 | 0.53 | 3.72500 | 0.53 | 3.72500 | 0.53 | 4.12500 | 1.33 | 3.02500 | 0.11 | 6.83 |
| 8 | 3.96000 | 0.91 | 3.41500 | 0.26 | 3.41500 | 0.26 | 3.96000 | 0.91 | 3.72500 | 0.53 | 4.62 |
| 9 | 3.96000 | 0.91 | 3.72500 | 0.53 | 3.96000 | 0.91 | 3.96000 | 0.91 | 3.41500 | 0.26 | 7.06 |
| 10 | 3.96000 | 0.91 | 3.02500 | 0.11 | 3.72500 | 0.53 | 3.72500 | 0.53 | 3.41500 | 0.26 | 4.16 |
| 11 | 3.72500 | 0.53 | 3.96000 | 0.91 | 3.02500 | 0.11 | 3.96000 | 0.91 | 3.41500 | 0.26 | 4.48 |
| 12 | 3.96000 | 0.91 | 3.41500 | 0.26 | 3.96000 | 0.91 | 3.72500 | 0.53 | 2.63500 | 0.04 | 5.57 |
| 13 | 4.12500 | 1.33 | 3.96000 | 0.91 | 3.41500 | 0.26 | 3.96000 | 0.91 | 3.72500 | 0.53 | 5.54 |
| 14 | 3.96000 | 0.91 | 3.41500 | 0.26 | 3.72500 | 0.53 | 3.72500 | 0.53 | 3.02500 | 0.11 | 4.29 |
| Extra | 3.96000 | 0.91 | 3.02500 | 0.11 | 3.72500 | 0.53 | 3.96000 | 0.91 | 3.02500 | 0.11 | 5.33 |
| Mean | | 0.81 | | 0.56 | | 0.59 | | 0.84 | | 0.36 | 5.73 |
| SE | | 0.08 | | 0.09 | | 0.09 | | 0.07 | | 0.08 | 0.39 |

### Caliper Methods

[0787] Caliper measurements of right knees were taken at 5 time points: baseline (day −1), 6 hours post-dose (day 0), 24 hours post-dose (day 1), pre-MSU injection (0 h, day 7), and 6 hours post-MSU injection (day 7). Knee caliper measurements were made using a spring-loaded micrometer caliper (Mitutuyo). Knee caliper measurements can be found in Table 11.

TABLE 11
Knee Caliper Data (MGA-UCM-2)

| | Day −1 | | Day 0.25 | | Day 1 | | Day 7 | | Day 7.25 | | |
|---|---|---|---|---|---|---|---|---|---|---|---|
| Treatment Group | Caliper | | Caliper | | Caliper | | Caliper | | Caliper | | |
| Group 1 | Measurement (mm) | | Measurement (mm) | | Measurement (mm) | | Measurement (mm) | | Measurement (mm) | | Day −1-7 |
| AAV-6 Scramble Vector | | Δ from | | Δ from | | Δ from | | Δ from | | Δ from | Δ from |
| (1 × 10\hat{ }10 particles/knee) | | Baseline | | Baseline | | Baseline | | Baseline | | Baseline | Baseline |
| IA, 1x (D 0) | Right | (D-1) | Right | (D-1) | Right | (D-1) | Right | (D-1) | Right | (D-1) | AUC |
| 1 | 3.63 | 0.00 | 3.65 | 0.02 | 3.63 | 0.00 | 3.63 | 0.00 | 3.68 | 0.05 | 0.03 |
| 2 | 3.88 | 0.00 | 3.92 | 0.04 | 3.88 | 0.00 | 3.85 | −0.03 | 3.90 | 0.02 | −0.05 |
| 3 | 3.67 | 0.00 | 3.72 | 0.05 | 3.67 | 0.00 | 3.67 | 0.00 | 3.70 | 0.03 | 0.05 |
| 4 | 3.65 | 0.00 | 3.70 | 0.05 | 3.85 | 0.00 | 3.64 | −0.01 | 3.68 | 0.03 | 0.02 |
| 5 | 3.58 | 0.00 | 3.62 | 0.04 | 3.58 | 0.00 | 3.58 | 0.00 | 3.62 | 0.04 | 0.05 |
| 6 | 3.60 | 0.00 | 3.61 | 0.01 | 3.60 | 0.00 | 3.60 | 0.00 | 3.62 | 0.02 | 0.01 |
| 7 | 3.89 | 0.00 | 3.94 | 0.05 | 3.89 | 0.00 | 3.87 | −0.02 | 3.91 | 0.02 | −0.01 |
| 8 | 3.73 | 0.00 | 3.74 | 0.01 | 3.73 | 0.00 | 3.73 | 0.00 | 3.78 | 0.05 | 0.02 |
| 9 | 3.70 | 0.00 | 3.23 | 0.03 | 3.70 | 0.00 | 3.69 | −0.01 | 3.74 | 0.04 | 0.00 |
| 10 | 3.68 | 0.00 | 3.69 | 0.03 | 3.68 | 0.00 | 3.67 | 0.01 | 3.75 | 0.09 | 0.07 |
| 11 | 3.65 | 0.00 | 3.69 | 0.04 | 3.85 | 0.00 | 3.65 | 0.00 | 3.70 | 0.05 | 0.05 |
| 12 | 3.63 | 0.00 | 3.68 | 0.05 | 3.63 | 0.00 | 3.63 | 0.00 | 3.67 | 0.04 | 0.06 |
| 13 | 3.72 | 0.00 | 3.72 | 0.80 | 3.72 | 0.00 | 3.72 | 0.00 | 3.75 | 0.03 | 0.00 |
| 14 | 3.78 | 0.00 | 3.80 | 0.02 | 3.78 | 0.00 | 3.76 | −0.02 | 3.81 | 0.03 | −0.04 |
| Extra | 3.54 | 0.00 | 3.57 | 0.03 | 3.54 | 0.00 | 3.94 | 0.00 | 3.58 | 0.02 | 0.03 |
| Mean | 3.70 | 0.00 | 3.73 | 0.83 | 3.70 | 0.00 | 3.69 | −0.01 | 3.74 | | 0.92 |
| SE | 0.03 | 0.00 | 0.03 | 0.80 | 0.03 | 0.00 | 0.02 | 0.00 | 0.02 | | 0.91 |
| ANOVA (Tukey's post- | | | | 0.129 | | | | 0.719 | | | 0.998 |
| hoc) vs Group 2 | | | | | | | | | | | |
| ANOVA (Tukey's post- | | | | 0.832 | | | | 0.959 | | | 1.000 |
| hoc) vs. Group 3 | | | | | | | | | | | |
| ANOVA (Tukey's post- | | | | 0.854 | | | | 0.816 | | | 0.999 |
| hoc) vs. Group 4 | | | | | | | | | | | |
| ANOVA (Tukey's post- | | | | 0.370 | | | | 0.618 | | | 1.000 |
| hoc) vs. Group 5 | | | | | | | | | | | |

| | Day −1 | | Day 0.25 | | Day 1 | | Day 7 | | Day 7.25 | | |
|---|---|---|---|---|---|---|---|---|---|---|---|
| Treatment Group | Caliper | | Caliper | | Caliper | | Caliper | | Caliper | | |
| Group 2 | Measurement (mm) | | Measurement (mm) | | Measurement (mm) | | Measurement (mm) | | Measurement (mm) | | Day −1-7 |
| AAV- [symbol] Guide 1 + 2 | | Δ from | | Δ from | | Δ from | | Δ from | | Δ from | Δ from |
| ( [symbol] × 10\hat{ } [symbol] of each guide/knee) | | Baseline | | Baseline | | Baseline | | Baseline | | Baseline | Baseline |
| IA, 1x (D 0) | Right | (D-1) | Right | (D-1) | Right | (D-1) | Right | (D-1) | Right | (D-1) | AUC |
| 1 | 3.48 | 0.00 | 3.48 | 0.00 | 3.48 | 0.00 | 3.48 | 0.09 | 3.51 | 0.01 | 0.00 |
| 2 | 4.94 | 0.00 | 4.04 | 0.00 | 4.04 | 0.00 | 4.02 | −0.02 | 4.04 | 0.00 | −0.06 |
| 3 | 3.67 | 0.00 | 3.67 | 0.00 | 3.67 | 0.00 | 3.67 | 0.00 | 3.71 | 0.04 | 0.01 |
| 4 | 3.92 | 0.00 | 3.62 | 0.00 | 3.62 | 0.00 | 3.62 | 0.00 | 3.67 | 0.05 | 0.01 |
| 5 | 3.58 | 0.00 | 3.58 | 0.00 | 3.58 | 0.00 | 3.58 | 0.00 | 3.62 | 0.04 | 0.01 |
| 6 | 3.80 | 0.00 | 3.85 | 0.05 | 3.80 | 0.00 | 3.81 | 0.01 | 3.84 | 0.04 | 0.04 |
| 7 | 3.58 | 0.00 | 3.84 | 0.01 | 3.88 | 0.00 | 3.88 | 0.00 | 3.90 | 0.02 | 0.01 |
| 8 | 3.75 | 0.00 | 3.75 | 0.00 | 3.75 | 0.00 | 3.75 | 0.00 | 3.79 | 0.04 | 0.01 |
| 9 | 3.56 | 0.00 | 3.60 | 0.04 | 3.56 | 0.00 | 3.56 | 0.00 | 3.65 | 0.09 | 0.05 |
| 10 | 3.64 | 0.00 | 3.64 | 0.00 | 3.64 | 0.00 | 3.64 | 0.00 | 3.67 | 0.03 | 0.00 |
| 11 | 3.63 | 0.00 | 3.70 | 0.05 | 3.65 | 0.00 | 3.65 | 0.00 | 3.69 | 0.04 | 0.06 |
| 12 | 3.75 | 0.00 | 3.75 | 0.00 | 3.25 | 0.00 | 3.74 | −0.01 | 3.78 | 0.03 | −0.03 |
| 13 | 3.68 | 0.00 | 3.68 | 0.00 | 3.68 | 0.00 | 3.68 | 0.00 | 3.68 | 0.00 | 0.00 |
| 14 | 3.65 | 0.00 | 3.69 | 0.04 | 3.65 | 0.00 | 3.65 | 0.00 | 3.65 | 0.00 | 0.04 |
| Extra | 3.62 | 0.00 | 3.64 | 0.02 | 3.82 | 0.00 | 3.62 | 0.00 | 3.65 | 0.03 | 0.02 |
| Mean | 3.70 | 0.00 | 3.71 | 0.01 | 3.70 | 0.00 | 3.70 | 0.00 | 3.73 | 0.03 | 0.01 |
| SE | 0.04 | 0.00 | 0.04 | 0.01 | 0.04 | 0.00 | 0.04 | 0.00 | 0.04 | 0.01 | 0.01 |
| ANOVA (Tukey's post- | | | | 0.741 | | | | 0.994 | | 0.252 | 0.989 |
| hoc) vs. Group 3 | | | | | | | | | | | |
| ANOVA (Tukey's pot- | | | | 0.906 | | | | >0.9999 | | 0.994 | 0.982 |
| hoc) vs. Group 4 | | | | | | | | | | | |
| ANOVA (Tukey's pot- | | | | 0.938 | | | | 0.999 | | 1.000 | 0.989 |
| hoc) vs. Group 5 | | | | | | | | | | | |
| | Day −1 | | Day 0.25 | | Day 1 | | Day 7 | | Day 7.25 | | |
| Treatment Group | Caliper | | Caliper | | Caliper | | Caliper | | Caliper | | |
| Group 5 | Measurement (mm) | | Measurement (mm) | | Measurement (mm) | | Measurement (mm) | | Measurement (mm) | | Day −1-7 |
| AAV-5 Guide 1 + 2 | | Δ from | | Δ from | | Δ from | | Δ from | | Δ from | Δ from |
| (5 × 10\hat{ }9 of each guide/knee) | | Baseline | | Baseline | | Baseline | | Baseline | | Baseline | Baseline |
| IA, 1x (D 0) | Right | (D-1) | Right | (D-1) | Right | (D-1) | Right | (D-1) | Right | (D-1) | AUC |
| 1 | 3.68 | 0.00 | 3.72 | 0.04 | 3.68 | 0.00 | 3.68 | 0.00 | 3.70 | 0.02 | 0.04 |
| 2 | 3.68 | 0.00 | 3.68 | 0.00 | 3.67 | 0.00 | 3.67 | −0.01 | 3.70 | 0.02 | −0.03 |
| 3 | 3.71 | 0.00 | 3.71 | 0.00 | 3.71 | 0.00 | 3.70 | −0.01 | 3.72 | 0.01 | −0.03 |
| 4 | 3.66 | 0.00 | 3.89 | 0.03 | 3.66 | 0.00 | 3.65 | −0.01 | 3.53 | 0.07 | 0.01 |
| 5 | 3.65 | 0.00 | 3.66 | 0.01 | 3.65 | 0.00 | 3.65 | 0.00 | 3.66 | 0.03 | 0.01 |
| 6 | 3.68 | 0.00 | 3.70 | 0.02 | 3.68 | 0.00 | 3.89 | 0.01 | 3.70 | 0.02 | 0.05 |
| 7 | 3.74 | 0.00 | 3.73 | 0.01 | 3.14 | 0.00 | 3.74 | 0.00 | 3.75 | 0.01 | 0.03 |
| 8 | 3.69 | 0.00 | 3.69 | 0.00 | 3.69 | 0.00 | 3.69 | 0.00 | 3.71 | 0.02 | 0.00 |
| 9 | 3.72 | 0.00 | 3.25 | 0.01 | 3.12 | 0.00 | 3.73 | 0.01 | 3.75 | 0.03 | 0.06 |
| 10 | 3.74 | 0.00 | 3.74 | 0.00 | 3.74 | 0.00 | 3.73 | −0.01 | 3.76 | 0.02 | −0.03 |
| 11 | 3.62 | 0.00 | 3.67 | 0.05 | 3.62 | 0.00 | 3.62 | 0.00 | 3.63 | 0.06 | 0.06 |
| 12 | 3.79 | 0.00 | 3.79 | 0.00 | 3.79 | 0.00 | 3.79 | 0.00 | 3.83 | 0.08 | 0.01 |
| 13 | 3.67 | 0.00 | 3.71 | 0.04 | 3.63 | 0.00 | 3.67 | 0.00 | 3.70 | 0.02 | 0.04 |
| 14 | 3.68 | 0.00 | 3.70 | 0.02 | 3.68 | 0.00 | 3.69 | 0.01 | 3.70 | 0.02 | 0.05 |
| Extra | 3.72 | 0.00 | 3.72 | 0.00 | 3.72 | 0.00 | 3.72 | 0.00 | 3.72 | 0.00 | 0.00 |
| Mean | 3.69 | 0.00 | 3.71 | 0.02 | 3.69 | 0.00 | 3.69 | 0.00 | 3.72 | 0.03 | 0.02 |
| SE | 0.01 | 0.00 | 0.01 | 0.00 | 0.01 | 0.00 | 0.01 | 0.00 | 0.01 | 0.01 | 0.01 |

| | Day −1 | | Day 0.25 | | Day 1 | | Day 7 | | Day 7.25 | | |
|---|---|---|---|---|---|---|---|---|---|---|---|
| | Caliper | | Caliper | | Caliper | | Caliper | | Caliper | | |
| Treatment Group | Measurement (mm) | | Measurement (mm) | | Measurement (mm) | | Measurement (mm) | | Measurement (mm) | | Day −1-7 |
| Group 3 | | Δ from | | Δ from | | Δ from | | Δ from | | Δ from | Δ from |
| PBS | | Baseline | | Baseline | | Baseline | | Baseline | | Baseline | Baseline |
| IA, 1x (D 0) | Right | (D-1) | Right | (D-1) | Right | (D-1) | Right | (D-1) | Right | (D-1) | AUC |
| 1 | 3.85 | 0.00 | 3.89 | 0.04 | 3.85 | 0.00 | 3.85 | 0.00 | 3.90 | 0.05 | 0.05 |
| 2 | 3.18 | 0.00 | 3.78 | 0.00 | 3.78 | 0.00 | 3.76 | −0.02 | 3.74 | 0.01 | −0.06 |
| 3 | 3.68 | 0.00 | 3.72 | 0.04 | 3.68 | 0.00 | 3.68 | 0.00 | 3.75 | 0.07 | 0.05 |
| 4 | 3.92 | 0.00 | 3.77 | 0.05 | 3.72 | 0.00 | 3.74 | 0.02 | 3.79 | 0.07 | 0.12 |
| 5 | 3.62 | 0.00 | 3.62 | 0.00 | 3.62 | 0.00 | 3.62 | 0.00 | 3.70 | 0.08 | 0.01 |
| 6 | 3.68 | 0.00 | 3.68 | 0.00 | 3.68 | 0.00 | 3.66 | −0.02 | 3.74 | 0.06 | −0.06 |
| 7 | 3.18 | 0.00 | 3.78 | 0.00 | 3.78 | 0.00 | 3.78 | 0.00 | 3.86 | 0.08 | 0.01 |
| 8 | 3.92 | 0.00 | 2.76 | 0.04 | 3.72 | 0.00 | 3.73 | 0.01 | 3.80 | 0.08 | 3.880.08 |
| 9 | 3.65 | 0.00 | 3.69 | 0.04 | 3.69 | 0.00 | 3.65 | 0.00 | 3.71 | 0.06 | 0.05 |
| 10 | 3.58 | 0.00 | 3.58 | 0.00 | 3.58 | 0.00 | 3.58 | 0.00 | 3.59 | 0.01 | 0.00 |
| 11 | 3.83 | 0.00 | 3.58 | 0.05 | 3.63 | 0.00 | 3.63 | 0.00 | 3.88 | 0.05 | 0.06 |
| 12 | 3.79 | 0.00 | 3.79 | 0.03 | 3.79 | 0.00 | 3.77 | −0.02 | 3.82 | 0.03 | −0.06 |
| 13 | 3.56 | 0.00 | 3.58 | 0.02 | 3.58 | 0.00 | 3.58 | 0.00 | 3.61 | 0.05 | 0.03 |
| 14 | 2.72 | 0.00 | 2.78 | 0.05 | 3.73 | 0.00 | 3.72 | 0.01 | 3.75 | 0.02 | 0.02 |
| Mean | 3.70 | 0.00 | 3.72 | 0.02 | 3.70 | 0.00 | 3.70 | 0.00 | 3.78 | 0.05 | 0.02 |
| SE | 0.82 | 0.00 | 0.02 | 0.01 | 0.02 | 0.00 | 0.02 | 0.00 | 0.02 | 0.01 | 0.01 |
| ANOVA (Tukey's post- | | | | >0.9999 | | | | 0.997 | | 0.214 | >0.9999 |
| hoc) vs. Group 4 | | | | | | | | | | | |
| ANOVA (Tukey's post- | | | | 0.989 | | | | 0.975 | | 0.100 | >0.9999 |
| hoc) vs. Group 5 | | | | | | | | | | | |
| | Day −1 | | Day 0.25 | | Day 1 | | Day 7 | | Day 7.25 | | |
| Treatment Group | Caliper | | Caliper | | Caliper | | Caliper | | Caliper | | |
| Group 4 | Measurement (mm) | | Measurement (mm) | | Measurement (mm) | | Measurement (mm) | | Measurement (mm) | | Day −1-7 |
| AAV-6 Scramble Vector | | Δ from | | Δ from | | Δ from | | Δ from | | Δ from | Δ from |
| (1 × 10\hat{ }10 particles/knee) | | Baseline | | Baseline | | Baseline | | Baseline | | Baseline | Baseline |
| IA, 1x (D 0) | Right | (D-1) | Right | (D-1) | Right | (D-1) | Right | (D-1) | Right | (D-1) | AUC |
| 1 | 3.67 | 0.00 | 3.70 | 0.03 | 3.67 | 0.00 | 3.68 | 0.01 | 3.70 | 0.03 | 0.07 |
| 2 | 3.77 | 0.00 | 3.80 | 0.03 | 3.77 | 0.00 | 3.75 | −0.02 | 3.81 | 0.04 | −0.03 |
| 3 | 3.72 | 0.00 | 3.74 | 0.02 | 3.72 | 0.00 | 3.73 | 0.01 | 3.79 | 0.01 | 0.05 |
| 4 | 3.61 | 0.00 | 3.63 | 0.02 | 3.61 | 0.00 | 3.61 | 0.00 | 3.68 | 0.05 | 0.03 |
| 5 | 3.68 | 0.00 | 3.71 | 0.03 | 3.68 | 0.00 | 3.68 | 0.00 | 3.71 | 0.03 | 0.03 |
| 6 | 3.54 | 0.00 | 3.84 | 0.00 | 3.84 | 0.00 | 3.82 | −0.02 | 3.87 | 0.03 | −0.06 |
| 7 | 3.72 | 0.00 | 3.74 | 0.02 | 3.72 | 0.00 | 3.72 | 0.00 | 3.77 | 0.05 | 0.01 |
| 8 | 3.70 | 0.00 | 3.82 | 0.12 | 3.70 | 0.00 | 3.71 | 0.01 | 3.72 | 0.02 | 0.15 |
| 9 | 3.80 | 0.00 | 3.81 | 0.01 | 3.80 | 0.00 | 3.81 | 0.01 | 3.81 | 0.03 | 0.05 |
| 10 | 3.72 | 0.00 | 3.72 | 0.00 | 3.72 | 0.00 | 3.72 | 0.00 | 3.76 | 0.04 | 0.00 |
| 11 | 3.60 | 0.00 | 3.80 | 0.00 | 3.60 | 0.00 | 3.60 | 0.00 | 3.82 | 0.02 | 0.00 |
| 12 | 3.63 | 0.00 | 3.64 | 0.01 | 3.63 | 0.00 | 3.61 | 0.00 | 3.69 | 0.06 | 0.02 |
| 13 | 3.59 | 0.00 | 3.59 | 0.00 | 3.59 | 0.00 | 3.57 | −0.02 | 3.62 | 0.01 | −0.06 |
| 14 | 3.68 | 0.00 | 3.70 | 0.02 | 3.68 | 0.00 | 3.68 | 0.00 | 3.71 | 0.01 | 0.02 |
| Extra | 3.74 | 0.00 | 3.75 | 0.01 | 3.74 | 0.00 | 3.72 | −0.02 | 3.73 | −0.01 | −0.05 |
| Mean | 3.70 | 0.00 | 3.72 | 0.02 | 3.70 | 0.00 | 3.69 | 0.00 | 3.73 | 0.04 | 0.02 |
| SE | 0.02 | 0.00 | 0.02 | 0.01 | 0.02 | 0.00 | 0.02 | 0.00 | 0.02 | 0.00 | 0.01 |
| ANOVA (Tukey's post- | | | | 0.998 | | | | 1.000 | | 0.963 | >0.9999 |
| hoc) vs. Group 5 | | | | | | | | | | | |

[symbol]

indicates data missing or illegible when filed

### Moribund or Found Dead Animals

[0788] If animals were found dead no samples were taken. For animals needing to be euthanized, regardless of reason, samples were taken as they would at necropsy (see Necropsy Information section). Animals on health assessment may be given SC fluids as well as hydrogel and food on the bottom of the cage.

### Study Group Designations

| | | | | Dose Level | Dose | Dose Conc. | Dose | |
|---|---|---|---|---|---|---|---|---|
| Grp | N | MSU | Treatment | (particles/knee) | Vol. | (particles/ml) | Route | Regimen |
| 1 | 14 | Yes | AAV-6 | 1 × 10¹⁰ | 10 μl | 1 × 10¹² | IA (right | 1x (Day 0) |
| | | | Scramble Vector | | | | knee) | |
| 2 | 14 | Yes | AAV-6 | 5 × 10⁹ (of | 10 μl | 1 × 10¹² | IA (right | 1x (Day 0) |
| | | | Guide 1 + 2 | each guide) | | | knee) | |
| 3 | 14 | Yes | PBS | — | 10 μl | — | IA (right | 1x (Day 0) |
| | | | | | | | knee) | |
| 4 | 14 | Yes | AAV-5 | 1 × 10¹⁰ | 10 μl | 1 × 10¹² | IA (right | 1x (Day 0) |
| | | | Scramble Vector | | | | knee) | |
| 5 | 14 | Yes | AAV-5 | 5 × 10⁹ (of | 10 μl | 1 × 10¹² | IA (right | 1x (Day 0) |
| | | | Guide 1 + 2 | each guide) | | | knee) | |

### Study Calendar

| Mon | Tue | Wed | Thu | Fri | Sat | Sun |
|---|---|---|---|---|---|---|
| May 4, 2020 | May 5, 2020 | May 6, 2020 | May 7, 2020 | May 8, 2020 | May 9, 2020 | May 10, 2020 |
| Day −10 | Day −9 | Day −8 | Day −7 | Day −6 | Day −5 | Day −4 |
| Distribute | | | | Acclimate to VF | | |
| animals on arrival | | | | | | |
| into groups for | | | | | | |
| acclimation | | | | | | |
| May 11, 2020 | May 12, 2020 | May 13, 2020 | May 14, 2020 | May 15, 2020 | May 16, 2020 | May 17, 2020 |
| Day −3 | Day −2 | Day −1 | Day 0 | Day 1 | Day 2 | Day 3 |
| Acclimate to VF | Acclimate to VF | Weigh & Randomize, | Timed Dose, | Timed Caliper, | Weigh | |
| | | Baseline Caliper, | Timed Caliper, | Timed Behavior | | |
| | | Baseline Behavior. | Timed Behavior | | | |
| | | Shave Knees | | | | |
| May 18, 2020 | May 19, 2020 | May 20, 2020 | May 21, 2020 | May 22, 2020 | May 23, 2020 | May 24, 2020 |
| Day 4 | Day 5 | Day 6 | Day 7 | Day 8 | Day 9 | Day 10 |
| | | Weigh, Shave | Timed MSU, | | | |
| | | Knees? | Timed Caliper, | | | |
| | | | Timed Behavior, | | | |
| | | | Timed Necropsy | | | |

### Materials

| Name | Supplier | Cat #* |
|---|---|---|
| MSU crystals | Invivogen | Tlrl-msu-25 |
| Vehicle (PBS) | Corning | 21-031-CV |
| Gene | SgRNA | AA06-CCPCTRO1-AD01-200 |
| Gene | SgRNA | AA06-MCP001682-AD01-2-200A |
| Gene | SgRNA | AA06-MCP001682-AD01-2-200B |
| Gene | SgRNA | AA05 -CCPCTROI-AD01-200 |
| Gene | SgRNA | AA05-MCP001682-AD01-2-200-9 |
| Gene | SgRNA | AA05-MCP001682-AD01-2-200-6 |
| Isoflurane | VetOne | 502017 |
| Syringes & Needles | BD | As needed |
| Serum Separator Tubes | Greiner Bio-One | #450472 (via Fisher) |
| (if needed) | | |
| Li Hep Mini-Collect | Greiner Bio-One | #450480 (via Fisher) |
| (if needed) | | |
| EDTA Mini-Collect | Greiner Bio-One | #450477 (via Fisher) |
| (if needed) | | |
| K3EDTA (if needed) | Covidien | #8881311149 (via Fisher) |

### Test Article and Vehicle Information

| | | | | Days of | Doses | Compound | 25% | TOTAL |
|---|---|---|---|---|---|---|---|---|
| Grp | Cpmd | N | ml/animal | Dosing | Per Day | Needed (ml) | Overage | Needed (ml) |
| 1 | AAV-6 Scramble Vector | 14 | 0.01 | 1 | 1 | 0.14 | 0.04 | 0.18 |
| 2 | AAV-6 Guide 1 + 2 | 14 | 0.01 | 1 | 1 | 0.14 | 0.04 | 0.18 |
| 3 | PBS | 14 | 0.01 | 1 | 1 | 0.14 | 0.04 | 0.18 |
| 4 | AAV-5 Scramble Vector | 14 | 0.01 | 1 | 1 | 0.14 | 0.04 | 0.18 |
| 5 | AAV-5 Guide 1 + 2 | 14 | 0.01 | 1 | 1 | 0.14 | 0.04 | 0.18 |

### Unformulated Test Article Storage Conditions;

AAV-6 Scrambled Vector (Group 1): −80 C.
AAV-6 Guide 1 + 2 (Group 2): −80 C.
PBS (Group 3): 4 C.
AAV-5 Scrambled Vector (Group 4): −80 C.
AAV-5 Guide 1 + 2 (Group 5): −80 C.

### Vehicle Information:

AAV-6 Scrambled Vector (Group 1): Sterile PBS (w/o Ca & Mg)
AAV-6 Guide 1 + 2 (Group 2): Sterile PBS (w/o Ca & Mg)
PBS (Group 3): Sterile PBS (w/o Ca & Mg)
AAV-5 Scrambled Vector (Group 4): Sterile PBS (w/o Ca & Mg)
AAV-5 Guide 1 + 2 (Group 5): Sterile PBS (w/o Ca & Mg)

### Test Article Formulation Instructions & Calculations;

AAV-6 Scrambled Vector (Group 1): Dilute stock to appropriate
concentration using sterile PBS (See AAV Preparation section)
AAV-6 Guide 1 + 2 (Group 2): Dilute stock to appropriate
concentration using sterile PBS (See AAV Preparation section)
PBS (Group 3): Use sterile PBS (See AAV Preparation section)
AAV-5 Scrambled Vector (Group 4): Dilute stock to appropriate
concentration using sterile PBS (See AAV Preparation section)
AAV-5 Guide 1 + 2 (Group 5): Dilute stock to appropriate
concentration using sterile PBS (See AAV Preparation section)

### Dosing Formulations and Vehicle Storage & Stability:

AAV-6 Scrambled Vector (Group 1): Dilute just prior to injecting
AAV-6 Guide 1 + 2 (Group 2): Dilute just prior to injecting
AAV-5 Scrambled Vector (Group 4): Dilute just prior to injecting
AAV-5 Guide 1 + 2 (Group 5): Dilute just prior to injecting

### Disposition of Test Articles Following Dosing:

AAV-6 Scrambled Vector (Group 1): Discard formulations, retain stock
solution at −80 C. for future studies
AAV-6 Guide 1 + 2 (Group 2): Discard formulations, retain stock solution
at −80 C. for future studies
AAV-5 Scrambled Vector (Group 4): Discard formulations, retain stock
solution at −80 C. for future studies
AAV-5 Guide 1 + 2 (Group 5): Discard formulations, retain stock solution
at −80 C. for future studies

### Live Phase

Live Phase Data Collection

| Type | Study Day | Grp (An) | Details |
|---|---|---|---|
| Body Weight | Day −1, 2, 6 | All | |
| Knee Caliper | Day −1 (Baseline) | All | Right Knee |
| | Day 0 (6 hr) | | Change from |
| | Day 1 (24 hour) | | baseline |
| | Day 7 (0 hr, 6 hour) | | |
| Von Frey | Day −1 (Baseline) | All | Right foot only |
| | Day 0 (6 hr) | | |
| | Day 1 (24 hour) | | |
| | Day 7 (0 hr, 6 hour) | | |

### Necropsy Information

[0799] The animals were necropsied after the final behavioral testing on study day 7 (approx. 6 h post-MSU). At necropsy, the animals were bled by cardiac puncture to exsanguination and euthanized by cervical dislocation for tissue collection. Whole blood was processed for serum (>200 μL/mouse), which was stored frozen at −80° C. for shipment to the study sponsor. Right (injected) and left (normal) knees from all animals were collected (skin, muscle, and feet were removed while keeping the knee joint intact). The joints were flash-frozen straight in 15-mL conical tubes for shipment to the sponsor.

| | |
|---|---|
| Sacrifice Schedule: | Study Day 7 (6 hours post MSU): |
| | ALL ANIMALS |
| Method of Euthanasia: | Bleed by cardiac puncture to exsanguinate |
| | followed by cervical dislocation. |
| Time Points: | After final behavior time point (6 hours |
| | post MSU) |

Necropsy Sample Collection:

| | Process | Anti- | | Final | Storage | |
|---|---|---|---|---|---|---|
| Type | For | Coag | Gr/An | Volume | Condition | Disposition |
| Cardiac | Serum | N/A | All | ≥200 μl | −80 C., Epps | Ship to |
| Puncture Whole | | | | | | Sponsor |
| Blood | | | | | | |

Necropsy Tissue Sample Collection:

| Type | Gr/An | Details | Storage Condition | Disposition |
|---|---|---|---|---|
| Right | All | Remove skin & | Flash freeze | Ship to |
| (Injected) | | muscle keeping | straight, place | Sponsor |
| Knee | | knee joint intact, | in 15 ml conical | |
| | | remove foot | | |
| Left | All | Remove skin & | Flash freeze | Ship to |
| (Normal) | | muscle keeping | straight, place | Sponsor |
| Knee | | knee joint intact, | in 15 ml conical | |
| | | remove foot | | |

### Statistical Analysis

[0800] Data were entered into Microsoft Excel and means and standard errors (SE) for each group were determined. The groups were compared using a one-way analysis of variance (ANOVA) or a repeated measures (RM) ANOVA with a Tukey's post-hoc analysis. ANOVA were performed using Prism v8.0.2 software (GraphPad). Unless indicated, BBP performs statistical analysis on raw (untransformed) data only. Statistical tests make certain assumptions regarding the data's normality and homogeneity of variance, and further analysis may be required if testing resulted in violations of these assumptions. Significance for all tests was set at p<0.050 with p values rounded to the third decimal place.

### AAV Preparation

### Standard Operating Procedure for Preparing Virus for Injection

[0801] Create a working stock that contains 5×10\hat{ }11 vg per ml for each construct (Guide 1, Guide 2). Note that for equivalence, the scramble control group needs to be injected with a total of 1×10\hat{ }10 copies of the scrambled vector. Diluent (PBS) will be used in the vehicle control group.

### Materials

AA06-CCPCTR01-AD01-200: Scramble control AAV-6 particles,
100 microliter solution containing 5 × 10\hat{ }12 vg per ml.
AA06-MCP001682-AD01-2-200-Guide 1: AAVPrime ™particles,
AAV-6 containing Guide 1, 100 microliter solution containing
5 × 10\hat{ }12 vg per ml.
AA06-MCP001682-AD01-2-200-Guide 2: AAVPrime ™particles,
AAV-6 containing Guide 2, 100 microliter solution containing
5 × 10\hat{ }12 vg per ml.
AA05-CCPCTR01-AD01-200: Scramble control AAV-5 particles,
100 microliter solution containing >5 × 10\hat{ }12 vg per ml.
AA05-MCP001682-AD01-2-200-Guide 1: AAVPrime ™particles,
AAV-5 containing Guide 1, 100 microliter solution
containing >5 × 10\hat{ }12 vg per ml.
AA05-MCP001682-AD01-2-200-Guide 2: AAVPrime ™particles,
AAV-5 containing Guide 2, 100 microliter solution
containing >5 × 10\hat{ }12 vg per ml.

### Procedure

[0803] Group 1: AAV-6 Scramble Control-Aliquot 400 microliters of sterile-filtered Ca- and Mg-free PBS into a sterile Eppendorf tube. Add 100 microliters (equivalent to 5×10\hat{ }11 vg) of the stock AA06-CCPCTR01-AD01-200. This results in a 0.5 ml volume of working stock containing 1×10\hat{ }12 vg/ml of the AAV-5 scramble control. Injection of 10 microliters of this solution into the knee joint delivers 1×10\hat{ }10 vg of the AAV-6 scramble control.

[0804] Group 2: Active AAV-6 Guide 1+2-Aliquot 800 microliters of sterile-filtered Ca- and Mg-free PBS into a sterile Eppendorf tube. Add 100 microliters (equivalent to 5×10\hat{ }11 vg) of each of the two active AAV-6 constructs—this means 100 microliters (equivalent to 5×10\hat{ }11 vg) of AA06-MCP001682-AD01-2-200-a and 100 microliters (equivalent to 5×10\hat{ }11 vg) of the stock AA06-MCP001682-AD01-2-200-b. This results in a 1 ml volume of working stock containing 5×10\hat{ }11 vg/ml for each of the two guides. Injection of 10 microliters of this solution into the knee joint delivers 5×10\hat{ }9 vg for each of the two AAV-6 guides.

[0805] Group 3: PBS—The sterile-filtered Ca- and Mg-free PBS used to dilute the virus stock served as the vehicle control for this study. It was dosed at 10 microliters per knee joint.

[0806] Group 4: AAV-5 Scramble Control-Aliquot 400 microliters of sterile-filtered Ca- and Mg-free PBS into a sterile Eppendorf tube. Add 100 microliters (equivalent to 5×10\hat{ }11 vg) of the stock AA05-CCPCTR01-AD01-200. This results in a 0.5 ml volume of working stock containing 1×10\hat{ }12 vg/ml of the AAV-5 scramble control. Injection of 10 microliters of this solution into the knee joint delivered 1×10\hat{ }10 vg of the AAV-5 scramble control.

[0807] Group 5: Active AAV-6 Guide 1+2-Aliquot 800 microliters of sterile-filtered Ca- and Mg-free PBS into a sterile Eppendorf tube. Add 100 microliters (equivalent to 5×10\hat{ }11 vg) of each of the two active AAV-6 constructs—this means 100 microliters (equivalent to 5×10\hat{ }11 vg) of AA05-MCP001682-AD01-2-200-a and 100 microliters (equivalent to 5×10\hat{ }11 vg) of the stock AA05-MCP001682-AD01-2-200-b. This results in a 1 ml volume of working stock containing 5×10\hat{ }11 vg/ml for each of the two guides. Injection of 10 microliters of this solution into the knee joint delivered 5×10\hat{ }9 vg for each of the two AAV-6 guides.

qPCR

[0808] Snap-frozen synovial tissues resected en bloc (including distal femur and proximal tibia) and placed in RLT buffer. Homogenised using Cyrolys Evolution tissue homogenizer (“HARD” programme cycle). RNA extracted using RNeasy or RNeasy Plus kits followed by QIAshredder (from QIAGEN). RNA quantified using Nanonstring. cDNA reverse transcribed and qPCR performed using mouse-specific primers for IL-1 beta, beta-actin and RPL13.

### Results

[0809] As shown in FIG. 6, PBS control mice had mean body weight gain of 4.3% (1.1 g) over the course of the study. Body weight gain did not differ statistically across groups (Table 7, Table 9).

[0810] As shown in FIG. 7A, knee caliper measurements in all groups peaked 6 hours post-dose on study day 0, returned to baseline by 24 hours post-dose, and then peaked again 6 hours post-MSU on study day 7. Knee caliper change from baseline did not differ statistically across groups over time (Table 11). As shown in FIG. 7B, knee caliper change AUC for days −1 through 7 did not differ statistically across groups (Table 7, Table 11).

[0811] As shown in FIG. 8A, von Frey absolute thresholds decreased slightly in all groups following IA dosing on study day 0 and then trended toward baseline on study day 7 before decreasing sharply following IA injection of MSU. There were no statistical differences over time between the AAV scramble vector control groups and the PBS control group. Mice treated with AAV-6 (Guide 1+2) had von Frey absolute thresholds that were increased 6 hours post-MSU on day 7 as compared to the control groups; the increase in von Frey absolute thresholds at this time point nearly reached statistical significance as compared to the AAV-6 scramble vector and PBS control groups (p=0.051 and p=0.075, respectively) and was statistically significant as compared to the AAV-5 scramble vector control group (p=0.025). Mice treated with AAV-5 (Guide 1+2) had von Frey absolute thresholds that did not differ statistically from the control groups over time (Table 10). As shown in FIG. 8B, von Frey absolute threshold AUC for days-1 through 7 did not differ statistically across groups (Table 7, Table 10).

[0812] As shown in FIG. 10, immunohistochemistry data for murine IL-1β in synovial tissue showed reduced IL-1β expression in CRISPR-treated animals. (A) In MSU injected animals pre-treated with PBS there is robust expression of IL-1β (brown staining). This effect is not seen in CRISPR-treated animals (panel C). The absence of IL-1β (brown staining) in CRISPR-treated animals resembles negative antibody controls (panels B & D). All images are 10× original magnification.

### Discussion & Conclusions

[0813] Mice treated IA (1× on day 0) with AAV-6 (Guide 1+2: 5×10⁹ vg/guide per knee) showed a statistically significant reduction in referred pain, as measured by von Frey testing, 6 hours after MSU injection on day 7 as compared to mice injected IA with AAV-5 scramble vector (p=0.025) with results being nearly significant as compared to the AAV-6 scramble vector and PBS control groups (p=0.051 and p=0.075, respectively). AUC calculations for von Frey assessments did not differ statistically across groups. Animal body weight gain and knee swelling did not differ statistically across groups. All animals survived to study termination.

### Example 6. Guide RNA Design

[0814] Guide RNAs targeting human IL-1α and IL-1β (Table 14) were designed according to the following procedure:
[0815] 1. Identify appropriate genome assembly and gene model (Tools: Ensemble, UCSC Genome Browser);
[0816] 2. Identify key functional domains to map out targeting window (Tools: Ensemble; Literature);
[0817] 3. Generate list of all possible guide RNAs across key exons (Tools: Ensemble, UCSC, InDelphi);
[0818] 4. Rank guides based on ML-predicted frameshifting score and exclude poor performers;
[0819] 5. Exclude guides <5 bp from intron:exon boundaries and with homopolynucleotide tracts of 6×T's or greater;
[0820] 6. Determine on-target (Doench 2016) and off-target (Hsu 2013) metrics for each guide (Tools: UCSC, Deskgen);
[0821] 7. Filter out guides with poor on- and off-target scores to generate final list; and
[0822] 8. Rank based on frameshift index.

[0823] Guide RNAs targeting cat, dog, or horse IL-1α and IL-1β (Table 15) were designed according to the following procedure:
[0824] 1. Identify appropriate genome assembly and gene model (Tools: Ensemble, UCSC Genome Browser)
[0825] 2. Identify key functional domains to map out targeting window (Tools: Ensemble; Literature)
[0826] 3. Retrieve coding sequence from appropriate exons and relevant flanking intronic sequences (Tools: Ensemble. APE)
[0827] 4. Generate list of all possible guide RNAs across key exons (Tools: Ensemble, InDelphi)
[0828] 5. Rank guides based on ML-predicted frameshifting score and exclude poor performers
[0829] 6. Exclude guides <5 bp from intron:exon boundaries and with homopolynucleotide tracts of 6×T's or greater
[0830] 7. Determine off-target metrics for each guide (Tools: Cas Off-Finder, Excel)
[0831] 8. Filter out guides with poor off-target scores to generate final list
[0832] 9. Rank based on frameshift index.

[0833] Gene transcript information for all species considered are included in Table 16.

TABLE 14

| | SEQ | | | | | | | | |
|---|---|---|---|---|---|---|---|---|---|
| Gene | ID | | | | Frameshift | Doench | Hsu | | |
| symbol | NO: | Species | Chromosome | Genome | (%) | 2016 | 2013 | gRNA | PAM |
| IL1B | 627 | Human | chr2 | hg38 | 80.1 | 55 | 76 | AGCTGGATGCCGCCATCCAG | AGG |
| IL1B | 628 | Human | chr2 | hg38 | 78.5 | 44 | 71 | ACCACTACAGCAAGGGCTTC | AGG |
| IL1B | 629 | Human | chr2 | hg38 | 75.4 | 63 | 92 | CATGGCCACAACAACTGACG | CGG |
| IL1B | 630 | Human | chr2 | hg38 | 74 | 60 | 97 | GGTGGTCGGAGATTCGTAGC | TGG |
| IL1B | 631 | Human | chr2 | hg38 | 87.6 | 55 | 61 | CTACAGCAAGGGCTTCAGGC | AGG |
| IL1B | 632 | Human | chr2 | hg38 | 85.6 | 61 | 58 | GACCTCTGCCCTCTGGATGG | CGG |
| IL1B | 633 | Human | chr2 | hg38 | 85.2 | 35 | 62 | CTCTCCGCAGTGCTCCTTCC | AGG |
| IL1B | 634 | Human | chr2 | hg38 | 78.5 | 50 | 62 | CATTCTCCTGGAAGGTCTGT | GGG |
| IL1A | 635 | Human | chr2 | hg38 | 92.1 | 70 | 87 | ATGGTGGTAGTAGCAACCAA | CGG |
| IL1A | 636 | Human | chr2 | hg38 | 88.3 | 51 | 88 | GCCATAGCTTACATGATAGA | AGG |
| IL1A | 637 | Human | chr2 | hg38 | 87 | 68 | 88 | CAGAGACAGATGATCAATGG | AGG |
| IL1A | 638 | Human | chr2 | hg38 | 87 | 50 | 74 | ATTCAGAGACAGATGATCAA | TGG |
| IL1A | 639 | Human | chr2 | hg38 | 83.1 | 53 | 91 | TGGTGGTAGTAGCAACCAAC | GGG |
| IL1A | 640 | Human | chr2 | hg38 | 85.7 | 60 | 67 | CTCCAGGTCATCATCAGTGA | TGG |

TABLE 15

| | SEQ | | | | | | | | |
|---|---|---|---|---|---|---|---|---|---|
| Gene | ID | | | | | Frameshift | CasOffFinder | | |
| symbol | NO: | Species | Chromosome | Exon | Genome | (%) | total | gRNA | PAM |
| IL1A | 641 | Horse | chr15 | 4 | EquCab3.0 | 80.9 | 21 | TGGTGCTGGTGGCAGCCAAC | GGG |
| IL1A | 642 | Horse | chr15 | 4 | EquCab3.0 | 79.2 | 14 | CTTCTTCAGAGTCTTCCCGT | TGG |
| IL1A | 643 | Horse | chr15 | 3 | EquCab3.0 | 74.9 | 37 | TTACCTGAGTCAGAGAGAGA | TGG |
| IL1A | 644 | Horse | chr15 | 4 | EquCab3.0 | 74.6 | 11 | AAGCTATGACCCACTTCCTG | AGG |
| IL1A | 645 | Horse | chr15 | 4 | EquCab3.0 | 71.5 | 14 | CCATGCAGTCCTCAGGAAGT | GGG |
| IL1A | 646 | Dog | chr17 | 3 | canFam4 | 75.7 | 7 | ACATGCAGTCCTCATGAAGT | GGG |
| IL1A | 647 | Dog | chr17 | 3 | canFam4 | 73.8 | 10 | GACATCCCAGCTTACCTTCA | AGG |
| IL1A | 648 | Dog | chr17 | 3 | canFam4 | 72.6 | 10 | GAGCTGTGACCCACTTCATG | AGG |
| IL1A | 649 | Dog | chr17 | 3 | canFam4 | 79.2 | 14 | CATTTTCCTTGAAGGTAAGC | TGG |
| IL1A | 650 | Dog | chr17 | 3 | canFam4 | 87 | 16 | TGGTAGTGGTGGCAGCCAAT | GGG |
| IL1A | 651 | Dog | chr17 | 3 | canFam4 | 76.8 | 18 | ATTTTCCTTGAAGGTAAGCT | GGG |
| IL1A | 652 | Dog | chr17 | 3 | canFam4 | 79.1 | 23 | CTTCTTTAGAATCTTCCCAT | TGG |
| IL1A | 653 | Dog | chr17 | 3 | canFam4 | 71.4 | 23 | GGATGTCTTTGAGATTTCAG | AGG |
| IL1A | 654 | Dog | chr17 | 3 | canFam4 | 88.5 | 28 | GTGGTAGTGGTGGCAGCCAA | TGG |
| IL1A | 655 | Dog | chr17 | 3 | canFam4 | 78.7 | 31 | CACTACCACATTTTCCTTGA | AGG |
| IL1A | 656 | Cat | chrA3 | 3 | Fc9.0 | 73.3 | 12 | GGTAAGCTGGGGTGTCTTAG | AGG |
| IL1A | 657 | Cat | chrA3 | 3 | Fc9.0 | 74.3 | 13 | ATTCCTCACTGCTGATGACC | TGG |
| IL1A | 658 | Cat | chrA3 | 3 | Fc9.0 | 86.7 | 15 | TGGTGATGGTGGCAGCCAAT | GGG |
| IL1A | 659 | Cat | chrA3 | 3 | Fc9.0 | 79.3 | 20 | CTTCCAGGTCATCAGCAGTG | AGG |
| IL1B | 660 | Horse | chr15 | 4 | EquCab3.0 | 87.6 | 27 | TGAAAGTCTTGTTGTAAAGT | TGG |
| IL1B | 661 | Horse | chr15 | 4 | EquCab3.0 | 79.6 | 15 | GACCTCAGCTCCATGGGCGA | TGG |
| IL1B | 662 | Horse | chr15 | 4 | EquCab3.0 | 78.5 | 13 | CTGGATGCCCCCATCGCCCA | TGG |
| IL1B | 663 | Horse | chr15 | 4 | EquCab3.0 | 75.4 | 17 | CCCCATCGCCCATGGAGCTG | AGG |
| IL1B | 664 | Horse | chr15 | 4 | EquCab3.0 | 75.2 | 12 | AAGTCTTGTTGTAAAGTTGG | TGG |
| IL1B | 665 | Dog | chr17 | 3 | canFam4 | 82.1 | 2 | CGTGTCAGTCATTGTAGCTT | TGG |
| IL1B | 666 | Dog | chr17 | 3 | canFam4 | 74.2 | 11 | CCACAGTTCTCTGGTAGATG | AGG |
| IL1B | 667 | Dog | chr17 | 3 | canFam4 | 80 | 13 | AGACCTGAACCACAGTTCTC | TGG |
| IL1B | 668 | Dog | chr17 | 3 | canFam4 | 80 | 14 | CCTCATCTACCAGAGAACTG | TGG |
| IL1B | 669 | Dog | chr17 | 3 | canFam4 | 80 | 15 | TCAGACTCTTGTTACAGAGC | TGG |
| IL1B | 670 | Cat | chrA3 | 2 | Fc9.0 | 82.4 | 8 | GTAGTAAGCCATCATTTCAC | TGG |
| IL1B | 671 | Cat | chrA3 | 4 | Fc9.0 | 82 | 4 | GAGTCTTAGGCATGCCGTGT | CGG |
| IL1B | 672 | Cat | chrA3 | 4 | Fc9.0 | 81.8 | 14 | AAACCTGAGCCACAGTTTTC | TGG |
| IL1B | 673 | Cat | chrA3 | 2 | Fc9.0 | 80.7 | 17 | ATCATTTCACTGGTGAGTTC | AGG |
| IL1B | 674 | Cat | chrA3 | 4 | Fc9.0 | 80.4 | 18 | ACTCTTGTTGTCGGGCTGGT | GGG |
| IL1B | 675 | Cat | chrA3 | 4 | Fc9.0 | 80.1 | 14 | GACTCTTGTTGTCGGGCTGG | TGG |
| IL1B | 676 | Cat | chrA3 | 4 | Fc9.0 | 76.7 | 24 | CCTCATCTCCCAGAAAACTG | TGG |
| IL1B | 677 | Cat | chrA3 | 3 | Fc9.0 | 76 | 23 | TGAGAATGACCTGTTCTTTG | AGG |
| IL1B | 678 | Cat | chrA3 | 4 | Fc9.0 | 75.7 | 5 | TAAGACTCTTGTTGTCGGGC | TGG |
| IL1B | 679 | Cat | chrA3 | 4 | Fc9.0 | 74.3 | 18 | AACCTGAGCCACAGTTTTCT | GGG |

TABLE 16

| Gene | Species | Ensemble | Transcript | Transcript_ID | Location |
|---|---|---|---|---|---|
| IL1A | Human | ENSG00000115008 | IL1A-201 | ENST00000263339.4 | Chromosome 2: 112,773,925-112,784,493 |
| IL1A | Mouse | ENSMUSG00000027399 | Il1a-201 | ENSMUST00000028882.1 | Chromosome 2: 129,299,610-129,309,972 |
| IL1A | Cat | ENSFCAG00000008095 | IL1A-201 | ENSFCAT00000008097.5 | Chromosome A3: 105,113,193-105,121,209 |
| IL1A | Dog | ENSCAFG00000007245 | IL1A-201 | ENSCAFT00000045928.3 | Chromosome 17: 36,970,573-36,978,736 |
| IL1A | Horse | ENSECAG00000023727 | IL1A-202 | ENSECAT00000025409.2 | Primary_assembly 15: 16,360,700-16,369,812 |
| IL1B | Human | ENSG00000125538 | IL1B-201 | ENST00000263341.7 | Chromosome 2: 112,829,751-112,836,779 |
| IL1B | Mouse | ENSMUSG00000027398 | Il1b-201 | ENSMUST00000028881.13 | Chromosome 2: 129,364,570-129,371,139 |
| IL1B | Cat | ENSFCAG00000005899 | IL1B-201 | ENSFCAT00000005904.5 | Chromosome A3: 105,049,334-105,056,407 |
| IL1B | Dog | ENSCAFG00000007249 | IL1B-201 | ENSCAFT00000011613.4 | Chromosome 17: 37,019,329-37,024,176 |
| IL1B | Horse | ENSECAG00000000051 | IL1B-202 | ENSECAT00000061518.2 | Primary_assembly 15: 16,418,738-16,444,697 |

### Example 7. Immunohistochemistry for Murine IL-1β

[0834] Immunohistochemistry was performed on Murine synovial tissue to detect IL-1β according to the following protocol:

### Reagents & Preparation

[0835] 1. 10×PBS with 0.5% (v/v) Tween-20
[0836] 2. Sterile PBS
[0837] 3. IHC buffer
[0838] 4. Primary antibody (goat anti-mouse IL-1; AF-401-NA, R&D Systems, Inc.) reconstituted to a final concentration of 0.2 mg/ml in sterile PBS.
   [0839] a. Short-term storage at +4 C b. Long-term storage at −20 to −70 C
[0840] 5. Reconstitute the control antibody (normal goat IgG; AB-108-C, R&D Systems Inc.) at a final concentration of 1 mg/ml in sterile PBS.
   [0841] a. Short-term storage at +4 C
   [0842] b. Long-term storage at −20 to −70 C
[0843] 6. Secondary antibody (HRP conjugated donkey anti-goat IgG; ab6885; Abcam) comes as reconstituted product
   [0844] a. Short-term storage at +4 C
   [0845] b. Long-term storage at −20 to −70 C
[0846] 7. Peroxidase block (BLOXALL reagent, Vector Laboratories)
[0847] 8. Normal horse serum, diluted to 2.5% (v/v) (Impress Polymer Kit; Vector Laboratories)
[0848] 9. DAB chromogen

### Method

[0849] Antigen retrieval was performed for 1 hour (manual or automated, user preference), and then samples were transferred to PBS for short-term storage. Peroxidase block was performed for 10 minutes at room temperature, and samples were subsequently washed in IHC buffer for 5 mins. Samples were blocked with control horse serum for 60 minutes at room temperature, and exposed to primary antibody (1:100 or 1:200 diluted in 1×PBS-Tween) for 2 hours at room temperature. Samples were washed in IHC buffer twice for 5 mins (each wash). Samples were then exposed to secondary antibody (1:500 diluted in 1×PBS-Tween) for 1 hour, and washed in IHC buffer twice for 5 mins (each wash). Detection was performed with DAB chromogen for 30 seconds. Counterstaining was performed with Mayer's haematoxylin (6 minutes), and samples were returned through graded alcohol series to xylene. DPX mountant was applied, and a coverslip was attached.

[0850] As shown in FIG. 10, immunohistochemistry data for murine IL-1β in synovial tissue showed reduced IL-1β expression in CRISPR-treated animals. (A) In MSU injected animals pre-treated with PBS there is robust expression of IL-1β (brown staining). This effect is not seen in CRISPR-treated animals (panel C). The absence of IL-1β (brown staining) in CRISPR-treated animals resembles negative antibody controls (panels B & D). All images are 10× original magnification. (A) and (B) are adjacent sections taken from the same joint in the same animal, with (A) showing tissue labeled specifically for IL-1 beta, and (B) showing tissue labeled with the negative (isotope) control antibody. Differences in staining reflect demonstrable IL-1 beta expression in MSU injected animals pre-treated with PBS in this animal (e.g., a positive control animal pre-treated with PBS, then challenged with MSU crystal). (C) and (D) are similarly adjacent sections, but from an animal that was pre-treated with the CRISPR editing virus prior to MSU injection. (C) There is no obvious staining for IL-1 beta in the section treated with IL-1 antibody, and (D) the same negative pattern is seen in the section treated with the negative (isotope) control antibody. Without wishing to be bound by any particular theory, this confirms that there is no detectable IL-1 beta expression in the synovium of CRISPR-treated animals.

### Example 8. Design and Validation of CRISPR/Cas9 RNA Guides Against Canine and Human Interleukin-1 Alpha (IL-1α) and Interleukin-1 Beta (IL-1β

[0851] Potential crRNA sequences were identified for various exons of the human and canine interleukin-1 alpha (IL-1a) and interleukin-1 beta (IL-1β) genes. FIGS. 13A-13D show a ranked list of crRNA sequences identified from exons 2-7 of the human IL-1α gene. FIGS. 14A-14E show a ranked list of crRNA sequences identified from exons 2-7 of the human IL-1β gene. FIGS. 15A-15C show crRNA sequences identified from exons 3-5 of the canine IL-1β gene. FIGS. 16A-16B show a crRNA sequences identified from exons 3-5 of the canine IL-1α gene.

[0852] Publicly accessible genomes (human, hg38; dog, CanFam3.1), collapsed gene models (merged Ensembl/Havana), tissue-specific exon expression (gtexportal.org) and various gRNA models were then used to select two to five individual crRNA sequences per gene, targeting canine and human interleukin-1 alpha (IL-1a) and interleukin-1 beta (IL-1β). The following gRNA design rules were applied:
[0853] 1. The gRNA target region was limited to the first 5-50% of the coding sequence (CDS).
[0854] 2. Single gRNAs were ranked according to maximal on-target editing using Azimuth 2.0 model (10.1038/nbt.3437) and minimal off-target editing using Cutting Frequencing Determination (CFD) (10.1038/nbt.3437) and the specificity score from Hsu et al. (10.1038/nbt.2647).
[0855] 3. Highly ranked sgRNA with high frameshift frequencies (>75%) and uniform DNA repair outcomes (>0.48) as predicted by inDelphi (10.1038/s41586-018-0686-x) were selected for in vitro synthesis.

[0856] Using this selection criteria, crRNA guide sequences targeting different exons of the respective target genes were selected for further investigation. Specifically, as shown in FIG. 17A, sg235 (SEQ ID NO:301) and sg236 (SEQ ID NO:309) target exons 3 and 4 of the human IL-1α gene were selected. Likewise, as shown in FIG. 17B, sg237 (SEQ ID NO:462), sg238 (SEQ ID NO:391), sg248 (SEQ ID NO:393), sg249 (SEQ ID NO:388), and sg250 (SEQ ID NO:389) targeting exons 3, 4, and 5 of the human IL-1β gene were selected. As shown in FIG. 17C, sg239 (SEQ ID NO:552), sg240 (SEQ ID NO:554), sg251 (SEQ ID NO:578), and sg252 (SEQ ID NO:579) targeting exons 3, 4, and 5 of the canine IL-1α gene were selected. Likewise, as shown in FIG. 17D, sg241 (SEQ ID NO:498) and sg242 (SEQ ID NO:506) targeting exons 3 and 4 of the canine IL-1β gene were selected.

[0857] Single guide RNAs (sgRNAs), fusing the selected crRNA guide sequences to a scaffold sequence were then synthesised (Synthego) with scaffold modifications designed to increase their stability and decrease their cellular immunogenicity. Primers for genotyping were designed to be at least 200 bp from the target site and generate PCR amplicons <1.5 kb and synthesized (Merck).

[0858] The following quantities were used for single electroporation-based transfection using the 4D-nucleofector (Lonza, Catalog AAF-1002B and AAF-1002X) and nucleocuvette strips. 80 pmol synthesised sgRNA were pre-complexed with 4 μg Cas9 nuclease at room temperature for at least 10 min. 300-400K dissociated cells were washed with PBS before resuspending them in 20 μl supplemented P3 nucleofection solution and adding the Cas9 RNP complex. These cells were then transferred into a nucleocuvette well and electroporated using the pulse code ER-100. Directly after electroporation, the nucleocuvette was placed into the 37° C./5% CO2 incubator for 10 min for the cells to recover from the electrical voltage. Afterwards, 80 μl growth medium was added to the nucleocuvette well and cells transferred into 6-well dishes with prewarmed growth medium.

[0859] Between two- and eleven-days post-electroporation, genomic DNA was extracted from 50-200K cells using DNeasy Blood & Tissue kit (Qiagen, Catalog 69506). Single gRNA target (and off-target) regions were amplified by PCR.

[0860] PCR products were size-verified by gel electrophoresis, purified using QIAquick PCR purification kit (Qiagen, Catalog 28106) and submitted for Sanger sequencing at Source BioScience. Sanger traces (ab1) were deconvoluted using ICE version 1.2 (found online at the URL github.com/synthego-open/ice) to infer CRISPR edits. In addition, machine-learning predictions of gene editing using the selected probes was generated using inDelphi. In addition, the predicted off-target sites were analysed through direct sequencing to verify whether gRNA facilitates off-target editing.

[0861] Results of the empirical experiments and machine-learning prediction of gene editing using the selected guide sequences is shown in FIG. 17.

### Example 9—Effect of Selected CRISPR/Cas9 RNA Guides on Canine and Human Interleukin-1 Alpha (IL-1α) and Interleukin-1 Beta (IL-1β) Release

[0862] The gRNA with the highest knockout (KO) scores from Example 8 (i.e., the highest frameshift frequency) were used to generate double IL-1α/IL-1β knock out (KO) cells. Specifically, human chondrocytes were edited to achieve >99% IL-1α KO using crRNA sequence CAGAGACAGAUGAUCAAUGG (SEQ ID NO:301) and 67% IL-1β KO using crRNA sequence GUGCAGUUCAGUGAUCGUAC (SEQ ID NO:389). Canine chondrocytes were edited to achieve 97% IL-1α KO using crRNA sequence GACAUCCCAGCUUACCUUCA (SEQ ID NO:554) and 99% IL-1β KO using crRNA sequence ACUCUUGUUACAGAGCUGGU (SEQ ID NO:506).

[0863] Canine chondrocytes (Catalog Cn402K-05), human chondrocytes (Catalog 402-05a) and human fibroblast-like synovial cells (Catalog 408-05a) were purchased as frozen stocks (5×10\hat{ }5 cells) from Cell Applications, Inc., San Diego, CA. Chondrocytes were cultured in growth medium consisting of DMEM/Ham's F12 (Gibco, Catalog 21331-020) supplemented with 20% (v/v) untreated FBS (Gibco, Catalog 10270-106) and 1× GlutaMAX (Gibco, Catalog 35050-038). Synovial cells were cultured in growth medium consisting of DMEM (Gibco, Catalog 11960-044), 10% non-treated FBS (Gibco, Catalog 10270-106) and 1× GlutaMAX (Gibco, Catalog 35050-038). Cells were confirmed as being negative for Mycoplasma spp. and subjected to STR profiling prior to use. For electroporation and subculture, cells were dissociated using 0.25% trypsin (Gibco, Catalog 25200056). Trypsin was quenched with 9 volumes of growth medium and cells were spun at 1,000 g to remove the supernatant.

[0864] Induction of IL-1 by LPS. Interleukin-1 release was induced by challenging sub-confluent monolayers of cells (edited or wild-type non-edited) with lipopolysaccharide (LPS). In brief, non-edited (control) and double IL-1α/IL-1β KO (edited) human or canine chondrocytes were seeded at density of approximately 5×10⁴ cells per well in 24-well plates. After 24-48 hours, the medium was replaced with fresh, serum-free medium containing either LPS (50 μg/ml) or PBS vehicle and the plates returned to the incubator. Plates were harvested after 6 and 24 hours for the determination of IL-1 release. Media were snap-frozen in liquid nitrogen and stored at −20° C. until they were assayed.

[0865] Measurement of IL-1 alpha and IL-1 beta release. The concentration of IL-1 alpha and IL-1 beta in culture medium was measured with species-specific commercial assays, following the manufacturer's instructions. Prior to measurement, frozen media were thawed and then centrifuged (1,500 g for 2 mins) in order to remove cellular debris. Aliquots of medium were measured in duplicate and the concentration of IL-1 determined from a standard curve of recombinant human or canine IL-1 alpha or beta, as appropriate. The results of IL-1 alpha release in canine cells are shown in FIGS. 18A (6 hours) and 18B (24 hours). The results of IL-1 beta release in canine cells are shown in FIGS. 18C (6 hours) and 18D (24 hours). The results of IL-1 alpha release in human cells are shown in FIGS. 19A (6 hours) and 19B (24 hours). The results of IL-1 beta release in human cells are shown in FIGS. 19C (6 hours) and 19D (24 hours).

[0866] P3 primary cell nucleofection reagents and nucleocuvette strips (Catalog V4XP-3032) were purchased from Lonza (Slough, UK). Cas9 nuclease (Catalog A36499) was purchased from Thermo Fisher Scientific. Lipopolysaccharide (LPS) from E. coli 055:B5 (Catalog L6529) was purchased from Merck. ELISA kits for human IL-1 alpha (Catalog ab214025) and human IL-1 beta (Catalog ab100560), canine IL-1 alpha (Catalog A4270) and canine IL-1 beta (Catalog ab273170) were purchased from Abcam (Cambridge, UK).

### Example 10—Increased Specificity of CRISPR/Cas9 Mediated Gene Editing

[0867] The analysis of gene editing specificity reported in Example 8 was repeated using an enhanced Specificity CRISPR associated protein 9. The eSpCas9 includes three specificity enhancing mutations: K848A, K1003A, and R1060A, as described in Slaymaker et al., Science, 351:84-88 (2016). The eSpCas9 was expressed in E. coli and purified to homogeneity. The construct has a molecular weight of 161 kDa and contains N-terminal Flag-tags and a C-terminal hexa-His-tag. The sequence of the eSpCas9 is:

(SEQ ID NO: 680)
MDYKDHDGDYKDHDIDYKDDDDKMAPKKKRKVGIHGVPAADKKYSIGL
DIGTNSVGWAVITDEYKVPSKKFKVLGNTDRHSIKKNLIGALLFDSGE
TAEATRLKRTARRRYTRRKNRICYLQEIFSNEMAKVDDSFFHRLEESF
LVEEDKKHERHPIFGNIVDEVAYHEKYPTIYHLRKKLVDSTDKADLRL
IYLALAHMIKFRGHFLIEGDLNPDNSDVDKLFIQLVQTYNQLFEENPI
NASGVDAKAILSARLSKSRRLENLIAQLPGEKKNGLFGNLIALSLGLT
PNFKSNFDLAEDAKLQLSKDTYDDDLDNLLAQIGDQYADLFLAAKNLS
DAILLSDILRVNTEITKAPLSASMIKRYDEHHQDLTLLKALVRQQLPE
KYKEIFFDQSKNGYAGYIDGGASQEEFYKFIKPILEKMDGTEELLVKL
NREDLLRKQRTFDNGSIPHQIHLGELHAILRRQEDFYPFLKDNREKIE
KILTFRIPYYVGPLARGNSRFAWMTRKSEETITPWNFEEVVDKGASAQ
SFIERMTNFDKNLPNEKVLPKHSLLYEYFTVYNELTKVKYVTEGMRKP
AFLSGEQKKAIVDLLFKTNRKVTVKQLKEDYFKKIECFDSVEISGVED
RFNASLGTYHDLLKIIKDKDFLDNEENEDILEDIVLTLTLFEDREMIE
ERLKTYAHLFDDKVMKQLKRRRYTGWGRLSRKLINGIRDKQSGKTILD
FLKSDGFANRNFMQLIHDDSLTFKEDIQKAQVSGQGDSLHEHIANLAG
SPAIKKGILQTVKVVDELVKVMGRHKPENIVIEMARENQTTQKGQKNS
RERMKRIEEGIKELGSQILKEHPVENTQLQNEKLYLYYLQNGRDMYVD
QELDINRLSDYDVDHIVPQSFLADDSIDNKVLTRSDKNRGKSDNVPSE
EVVKKMKNYWRQLLNAKLITQRKFDNLTKAERGGLSELDKAGFIKRQL
VETRQITKHVAQILDSRMNTKYDENDKLIREVKVITLKSKLVSDFRKD
FQFYKVREINNYHHAHDAYLNAVVGTALIKKYPALESEFVYGDYKVYD
VRKMIAKSEQEIGKATAKYFFYSNIMNFFKTEITLANGEIRKAPLIET
NGETGEIVWDKGRDFATVRKVLSMPQVNIVKKTEVQTGGFSKESILPK
RNSDKLIARKKDWDPKKYGGFDSPTVAYSVLVVAKVEKGKSKKLKSVK
ELLGITIMERSSFEKNPIDFLEAKGYKEVKKDLIIKLPKYSLFELENG
RKRMLASAGELQKGNELALPSKYVNFLYLASHYEKLKGSPEDNEQKQL
FVEQHKHYLDEIIEQISEFSKRVILADANLDKVLSAYNKHRDKPIREQ
AENIIHLFTLTNLGAPAAFKYFDTTIDRKRYTSTKEVLDATLIHQSIT
GLYETRIDLSQLGGDKRPAATKKAGQAKKKKAAALEHHHHHH.

[0868] Briefly, the same sgRNAs used in Example 8, and shown in FIG. 17, were complexed with the eSpCas9. As shown in FIG. 17A, sg235 (SEQ ID NO:301) and sg236 (SEQ ID NO:309) target exons 3 and 4 of the human IL-1α gene were used. Likewise, as shown in FIG. 17B, sg237 (SEQ ID NO:462), sg238 (SEQ ID NO:391), sg248 (SEQ ID NO:393), sg249 (SEQ ID NO:388), and sg250 (SEQ ID NO:389) targeting exons 3, 4, and 5 of the human IL-1β gene were used. As shown in FIG. 17C, sg239 (SEQ ID NO:552), sg240 (SEQ ID NO:554), sg251 (SEQ ID NO:578), and sg252 (SEQ ID NO:579) targeting exons 3, 4, and 5 of the canine IL-1α gene were used. Likewise, as shown in FIG. 17D, sg241 (SEQ ID NO:498) and sg242 (SEQ ID NO:506) targeting exons 3 and 4 of the canine IL-1β gene were used.

[0869] Single guide RNAs (sgRNAs), fusing the selected crRNA guide sequences to a scaffold sequence were then synthesised (Synthego) with scaffold modifications designed to increase their stability and decrease their cellular immunogenicity. Primers for genotyping were designed to be at least 200 bp from the target site and generate PCR amplicons <1.5 kb and synthesized (Merck).

[0870] The following quantities were used for single electroporation-based transfection using the 4D-nucleofector (Lonza, Catalog AAF-1002B and AAF-1002X) and nucleocuvette strips. 80 pmol synthesised sgRNA were pre-complexed with eSpCas9 nuclease at room temperature for at least 10 min. 300-400K dissociated cells were washed with PBS before resuspending them in 20 μl supplemented P3 nucleofection solution and adding the Cas9 RNP complex. These cells were then transferred into a nucleocuvette well and electroporated using the pulse code ER-100. Directly after electroporation, the nucleocuvette was placed into the 37° C./5% CO2 incubator for 10 min for the cells to recover from the electrical voltage. Afterwards, 80 μl growth medium was added to the nucleocuvette well and cells transferred into 6-well dishes with prewarmed growth medium.

[0871] Between two- and eleven-days post-electroporation, genomic DNA was extracted from 50-200K cells using DNeasy Blood & Tissue kit (Qiagen, Catalog 69506). Single gRNA target (and off-target) regions were amplified by PCR.

[0872] PCR products were size-verified by gel electrophoresis, purified using QIAquick PCR purification kit (Qiagen, Catalog 28106) and submitted for Sanger sequencing at Source BioScience. Sanger traces (ab1) were deconvoluted using ICE version 1.2 (found online at the URL github.com/synthego-open/ice) to infer CRISPR edits. In addition, machine-learning predictions of gene editing using the selected probes was generated using inDelphi. In addition, the predicted off-target sites were analysed through direct sequencing to verify whether gRNA facilitates off-target editing.

[0873] As compared to the Cas9 editing reported in Example 8, use of eSpCas9 reduces off-target editing without losing on-target activity. For example, the off-target editing by sgRNA #242 (targeting canine IL-1β) of three loci, having 2, 3, and 3 mismatches, respectively, were evaluated by amplifying and then sequencing the loci reported in Table 18. As shown in Table 18, the first off-target loci experienced no editing in the experiment described in Example 8, and was not tested here. The second off-target loci experienced almost complete off-target editing (98-99%) in the experiment described in Example 8, but experienced no editing when eSpCas9 was used. The third off-target loci experienced some editing (0-25%) in the experiment described in Example 8, but again experienced no editing when eSpCas9 was used. Further, as shown in Table 17, the “enhanced on-target score,” corresponding to editing using eSpCas9 as described in this example, for each sgRNA tested was as high, if not higher, than the “on-target score,” corresponding to the editing described in Example 8.

TABLE 17

| | Target | | On-target metrics | Precision | Frameshift | Enhanced on-target | Off-target metrics |
|---|---|---|---|---|---|---|---|
| # | Exon # | Strand | On-target score* | score** | %*** | score**** | Off-target score\hat{ } |
| sg235 | 3 | − | 69.5 | 0.57 | 93.7 | 72.4 | 67 |
| sg236 | 4 | − | 53.9 | 0.65 | 93.9 | 66.7 | 76.9 |

Human IL1B (IL1B-201; GRCh38)

| | | | | | | | |
|---|---|---|---|---|---|---|---|
| sg237 | 3 | + | 60.9 | 0.57 | 80 | 64.7 | 66.7 |
| sg238 | 4 | − | 58.3 | 0.6 | 86.3 | 65.7 | 49.3 |
| sg248 | 5 | + | 61.7 | 0.65 | 89.9 | 69.6 | 86.5 |
| sg249 | 5 | + | 68.2 | 0.52 | 75.3 | 65.9 | 93.8 |
| sg250 | 5 | − | 64.4 | 0.48 | 83.9 | 65.2 | 91 |

Canine IL1A (IL1A-201; CanFam3.1)

| | | | | | | | |
|---|---|---|---|---|---|---|---|
| sg239 | 3 | + | 49.5 | 0.55 | 78.3 | 58.1 | 57.7 |
| sg240 | 4 | + | 43.8 | 0.61 | 87.2 | 59.0 | 41.8 |
| sg251 | 5 | + | 72.1 | 0.49 | 77.6 | 67.7 | 85.1 |
| sg252 | 5 | − | 68.4 | 0.48 | 90.4 | 68.8 | 66.6 |

Canine IL1B (IL1B-201; CanFam3.1)

| | | | | | | | |
|---|---|---|---|---|---|---|---|
| sg241 | 3 | + | 66.1 | 0.53 | 91.2 | 69.1 | 51.5 |
| sg242 | 4 | − | 68.9 | 0.64 | 84 | 71.5 | 62 |

TABLE 18

| | | | | | | | | | CRISPR |
|---|---|---|---|---|---|---|---|---|---|
| | | | | | | | | CRISPR | Edits with |
| | | | | | | | | Edits | enhanced |
| | | | | Chrom- | | | Mis- | with | specificity |
| Sequence | PAM | Score | Gene | osome | Strand | Position | matches | Cas9 | Cas9 |
| ACTCTTGTTA | GGG | 100 | ENSCAFG00000007249 | chr17 | 1 | 37022194 | 0 | | |
| CAGAGCTGGT | | | | | | | | | |
| ACTTTTGTTT | CAG | 6.16161972 | | chr33 | -1 | 20234937 | 2 | 0% | |
| CAGAGCTGGT | | | | | | | | | |
| CCTCATGCTA | GGG | 2.76564774 | | chr1 | -1 | 47541563 | 3 | 98- | 0% |
| CAGAGCTGGT | | | | | | | | 99% | |
| GTGCTTGTTA | GGG | 2.32143742 | | chr26 | -1 | 32323843 | 3 | 0- | 0% |
| CAGAGCTGGT | | | | | | | | 25% | |

[0874] The examples set forth above are provided to give those of ordinary skill in the art a complete disclosure and description of how to make and use the embodiments of the compositions, systems and methods of the disclosure, and are not intended to limit the scope of what the inventors regard as their invention. Modifications of the above-described modes for carrying out the embodiments of the disclosure that are obvious to persons of skill in the art are intended to be within the scope of the following claims. All patents and publications mentioned in the specification are indicative of the levels of skill of those skilled in the art to which the disclosure pertains.

[0875] All headings and section designations are used for clarity and reference purposes only and are not to be considered limiting in any way. For example, those of skill in the art will appreciate the usefulness of combining various aspects from different headings and sections as appropriate according to the spirit and scope of the disclosure described herein.

[0876] It is to be understood that the methods described herein are not limited to the particular methodology, protocols, subjects, and sequencing techniques described herein and as such can vary. It is also to be understood that the terminology used herein is for the purpose of describing particular embodiments only, and is not intended to limit the scope of the methods and compositions described herein, which will be limited only by the appended claims. While some embodiments of the present disclosure have been shown and described herein, it will be obvious to those skilled in the art that such embodiments are provided by way of example only. Numerous variations, changes, and substitutions will now occur to those skilled in the art without departing from the disclosure. It should be understood that various alternatives to the embodiments of the disclosure described herein can be employed in practicing the disclosure. It is intended that the following claims define the scope of the disclosure and that methods and structures within the scope of these claims and their equivalents be covered thereby.

[0877] Several aspects are described with reference to example applications for illustration. Unless otherwise indicated, any embodiment can be combined with any other embodiment. It should be understood that numerous specific details, relationships, and methods are set forth to provide a full understanding of the features described herein. A skilled artisan, however, will readily recognize that the features described herein can be practiced without one or more of the specific details or with other methods. The features described herein are not limited by the illustrated ordering of acts or events, as some acts can occur in different orders and/or concurrently with other acts or events. Furthermore, not all illustrated acts or events are required to implement a methodology in accordance with the features described herein.

[0878] While some embodiments have been shown and described herein, it will be obvious to those skilled in the art that such embodiments are provided by way of example only. It is not intended that the disclosure be limited by the specific examples provided within the specification. While the disclosure has been described with reference to the aforementioned specification, the descriptions and illustrations of the embodiments herein are not meant to be construed in a limiting sense. Numerous variations, changes, and substitutions will now occur to those skilled in the art without departing from the disclosure.

[0879] Furthermore, it shall be understood that all aspects of the disclosure are not limited to the specific depictions, configurations or relative proportions set forth herein which depend upon a variety of conditions and variables. It should be understood that various alternatives to the embodiments of the disclosure described herein can be employed in practicing the disclosure. It is therefore contemplated that the disclosure shall also cover any such alternatives, modifications, variations or equivalents. It is intended that the following claims define the scope of the disclosure and that methods and structures within the scope of these claims and their equivalents be covered thereby.

[0880] All publications, patents, and patent applications herein are incorporated by reference to the same extent as if each individual publication, patent, or patent application was specifically and individually indicated to be incorporated by reference. In the event of a conflict between a term herein and a term in an incorporated reference, the term herein controls.

1. A pharmaceutical composition for the treatment or prevention of a joint disease or condition, comprising:
a therapeutically effective amount of a Clustered Regularly Interspaced Short Palindromic Repeats (CRISPR) gene-editing system, the system comprising:
(i) an mRNA encoding a CRISPR Associated Protein (Cas) protein; and
(ii) at least one guide RNA targeting a gene associated with the production, blocking, or removal of reactive oxygen species (ROS), wherein the target sequence is adjacent to a protospacer adjacent motif (PAM) sequence for the Cas protein.

2-5. (canceled)

6. The pharmaceutical composition of claim 1, wherein the at least one guide RNA comprises a crRNA sequence selected from the group consisting of SEQ ID NOs: 681-5322.

7. The pharmaceutical composition of claim 1, wherein the at least one guide RNA targets a human gene.

8. The pharmaceutical composition of claim 1, wherein the at least one guide RNA targets a canine gene.

9. The pharmaceutical composition of claim 1, wherein the at least one guide RNA targets an equine gene.

10. The pharmaceutical composition of claim 1, wherein the Cas protein is a CRISPR Associated Protein 9 (Cas9) protein.

11. The pharmaceutical composition claim 1, wherein the composition comprises one or more viral vectors collectively comprising the one or more nucleic acids.

12-17. (canceled)

18. The pharmaceutical composition of claim 1, wherein the composition comprises one or more liposomes collectively comprising the one or more nucleic acids.

19. The pharmaceutical composition of claim 1, wherein the one or more nucleic acids are present in a naked state.

20. The pharmaceutical composition of claim 1, wherein the Cas protein is an S. pyogenes Cas9 polypeptide.

21. The pharmaceutical composition of claim 1, wherein the Cas protein is an S. aureus Cas9 polypeptide.

22. The pharmaceutical composition of claim 1, wherein the composition is formulated for parenteral administration.

23. The pharmaceutical composition of claim 1, wherein the composition is formulated for intra-articular injection within a joint of a subject.

24. A method for the treatment or prevention of a joint disease or condition in a subject in need thereof, the method comprising:
administering, to a joint of the subject, a pharmaceutical composition comprising a pharmaceutically effective amount of a composition comprising a Clustered Regularly Interspaced Short Palindromic Repeats (CRISPR) gene-editing system, the system comprising:
(i) an mRNA encoding a CRISPR Associated Protein (Cas) protein; and
(ii) at least one guide RNA targeting a gene associated with the production, blocking, or removal of reactive oxygen species (ROS), wherein the target sequence is adjacent to a protospacer adjacent motif (PAM) sequence for the Cas protein.

25-46. (canceled)

The application's sequence listing, which the Patent Office published only in electronic form, follows.

SEQUENCE LISTING (5134 sequences)

SEQ ID NO: 1 - protein, 271 aa, Homo sapiens
MAKVPDMFEDLKNCYSENEEDSSSIDHLSLNQKSFYHVSYGPLHEGCMDQSVSLSISETSKTSKLTFKESMVVVATNGKVLKKRRLSLSQSITDDDLEAIANDSEEEIIKPRSAPFSFLSNVKYNFMRIIKYEFILNDALNQSIIRANDQYLTAAALHNLDEAVKFDMGAYKSSKDDAKITVILRISKTQLYVTAQDEDQPVLLKEMPEIPKTITGSETNLLFFWETHGTKNYFTSVAHPNLFIATKQDYWVCLAGGPPSITDFQILENQA

SEQ ID NO: 2 - protein, 269 aa, Homo sapiens
MAEVPELASEMMAYYSGNEDDLFFEADGPKQMKCSFQDLDLCPLDGGIQLRISDHHYSKGFRQAASVVVAMDKLRKMLVPCPQTFQENDLSTFFPFIFEEEPIFFDTWDNEAYVHDAPVRSLNCTLRDSQQKSLVMSGPYELKALHLQGQDMEQQVVFSMSFVQGEESNDKIPVALGLKEKNLYLSCVLKDDKPTLQLESVDPKNYPKKKMEKRFVFNKIEINNKLEFESAQFPNWYISTSQAENMPVFLGGTKGGQDITDFTMQFVSS

SEQ ID NO: 3 - protein, 270 aa, Mus musculus
MAKVPDLFEDLKNCYSENEDYSSAIDHLSLNQKSFYDASYGSLHETCTDQFVSLRTSETSKMSNFTFKESRVTVSATSSNGKILKKRRLSFSETFTEDDLQSITHDLEETIQPRSAPYTYQSDLRYKLMKLVRQKFVMNDSLNQTIYQDVDKHYLSTTWLNDLQQEVKFDMYAYSSGGDDSKYPVTLKISDSQLFVSAQGEDQPVLLKELPETPKLITGSETDLIFFWKSINSKNYFTSAAYPELFIATKEQSRVHLARGLPSMTDFQIS

SEQ ID NO: 4 - protein, 269 aa, Mus musculus
MATVPELNCEMPPFDSDENDLFFEVDGPQKMKGCFQTFDLGCPDESIQLQISQQHINKSFRQAVSLIVAVEKLWQLPVSFPWTFQDEDMSTFFSFIFEEEPILCDSWDDDDNLLVCDVPIRQLHYRLRDEQQKSLVLSDPYELKALHLNGQNINQQVIFSMSFVQGEPSNDKIPVALGLKGKNLYLSCVMKDGTPTLQLESVDPKQYPKKKMEKRFVFNKIEVKSKVEFESAEFPNWYISTSQAEHKPVFLGNNSGQDIIDFTMESVSS

SEQ ID NO: 5 - protein, 177 aa, Homo sapiens
MEICRGLRSHLITLLLFLFHSETICRPSGRKSSKMQAFRIWDVNQKTFYLRNNQLVAGYLQGPNVNLEEKIDVVPIEPHALFLGIHGGKMCLSCVKSGDETRLQLEAVNITDLSENRKQDKRFAFIRSDSGPTTSFESAACPGWFLCTAMEADQPVSLTNMPDEGVMVTKFYFQEDE

SEQ ID NO: 6 - protein, 178 aa, Homo sapiens
MEICWGPYSHLISLLLILLFHSEAACRPSGKRPCKMQAFRIWDTNQKTFYLRNNQLIAGYLQGPNIKLEEKIDMVPIDLHSVFLGIHGGKLCLSCAKSGDDIKLQLEEVNITDLSKNKEEDKRFTFIRSEKGPTTSFESAACPGWFLCTTLEADRPVSLTNTPEEPLIVTKFYFQEDQ

SEQ ID NO: 7 - DNA, 20 bp, Mus musculus
gtatcagcaacgtcaagcaa

SEQ ID NO: 8 - DNA, 20 bp, Mus musculus
ctgcaggtcatcttcagtga

SEQ ID NO: 9 - DNA, 20 bp, Mus musculus
tatcagcaacgtcaagcaac

SEQ ID NO: 10 - DNA, 20 bp, Mus musculus
gccatagcttgcatcataga

SEQ ID NO: 11 - DNA, 20 bp, Mus musculus
catcaacaagagcttcaggc

SEQ ID NO: 12 - DNA, 20 bp, Mus musculus
tgctctcatcaggacagccc

SEQ ID NO: 13 - DNA, 20 bp, Mus musculus
gctcatgtcctcatcctgga

SEQ ID NO: 14 - DNA, 20 bp, Mus musculus
cctcatcctggaaggtccac

SEQ ID NO: 15 - DNA, 21 bp, Mus musculus
ttactccttaccttccagatc

SEQ ID NO: 16 - DNA, 21 bp, Mus musculus
gaaactcagccgtctcttctt

SEQ ID NO: 17 - DNA, 21 bp, Mus musculus
caacttcaccttcaaggagag

SEQ ID NO: 18 - DNA, 21 bp, Mus musculus
gtgtctttcccgtggaccttc

SEQ ID NO: 19 - DNA, 21 bp, Mus musculus
cacagcttctccacagccaca

SEQ ID NO: 20 - DNA, 21 bp, Mus musculus
gtgctgctgcgagatttgaag

SEQ ID NO: 21 - RNA, 20 nt, Mus musculus
guaucagcaacgucaagcaa

SEQ ID NO: 22 - RNA, 20 nt, Mus musculus
cugcaggucaucuucaguga

SEQ ID NO: 23 - RNA, 20 nt, Mus musculus
uaucagcaacgucaagcaac

SEQ ID NO: 24 - RNA, 20 nt, Mus musculus
gccauagcuugcaucauaga

SEQ ID NO: 25 - RNA, 20 nt, Mus musculus
caucaacaagagcuucaggc

SEQ ID NO: 26 - RNA, 20 nt, Mus musculus
ugcucucaucaggacagccc

SEQ ID NO: 27 - RNA, 20 nt, Mus musculus
gcucauguccucauccugga

SEQ ID NO: 28 - RNA, 20 nt, Mus musculus
ccucauccuggaagguccac

SEQ ID NO: 29 - RNA, 21 nt, Mus musculus
uuacuccuuaccuuccagauc

SEQ ID NO: 30 - RNA, 21 nt, Mus musculus
gaaacucagccgucucuucuu

SEQ ID NO: 31 - RNA, 21 nt, Mus musculus
caacuucaccuucaaggagag

SEQ ID NO: 32 - RNA, 21 nt, Mus musculus
gugucuuucccguggaccuuc

SEQ ID NO: 33 - RNA, 21 nt, Mus musculus
cacagcuucuccacagccaca

SEQ ID NO: 34 - RNA, 21 nt, Mus musculus
gugcugcugcgagauuugaag

SEQ ID NO: 35 - RNA, 81 nt, Mus musculus
guuauaguacucuggaaacagaaucuacuaaaacaaggcaaaaugccguguuuaucucgucaacuuguuggcgagauuuuu

SEQ ID NO: 36 - RNA, 82 nt, Mus musculus
guuauagagcuagaaauagcaaguuaaaauaaggcuaguccguuaucaacuugaaaaaguggcaccgagucggugcuuuuuu

SEQ ID NO: 37 - DNA, 20 bp, Homo sapiens
gccatagcttacatgataga

SEQ ID NO: 38 - DNA, 20 bp, Homo sapiens
tccttctatcatgtaagcta

SEQ ID NO: 39 - DNA, 20 bp, Homo sapiens
ccatgcagccttcatggagt

SEQ ID NO: 40 - DNA, 20 bp, Homo sapiens
tccatgcagccttcatggag

SEQ ID NO: 41 - DNA, 20 bp, Homo sapiens
agctatggcccactccatga

SEQ ID NO: 42 - DNA, 20 bp, Homo sapiens
attgatccatgcagccttca

SEQ ID NO: 43 - DNA, 20 bp, Homo sapiens
cccactccatgaaggctgca

SEQ ID NO: 44 - DNA, 20 bp, Homo sapiens
gctctccttgaaggtaagct

SEQ ID NO: 45 - DNA, 20 bp, Homo sapiens
taccaccatgctctccttga

SEQ ID NO: 46 - DNA, 20 bp, Homo sapiens
gcttaccttcaaggagagca

SEQ ID NO: 47 - DNA, 20 bp, Homo sapiens
taccttcaaggagagcatgg

SEQ ID NO: 48 - DNA, 20 bp, Homo sapiens
atggtggtagtagcaaccaa

SEQ ID NO: 49 - DNA, 20 bp, Homo sapiens
tggtggtagtagcaaccaac

SEQ ID NO: 50 - DNA, 20 bp, Homo sapiens
cttcttcagaaccttcccgt

SEQ ID NO: 51 - DNA, 20 bp, Homo sapiens
ggtagtagcaaccaacggga

SEQ ID NO: 52 - DNA, 20 bp, Homo sapiens
ggaaggttctgaagaagaga

SEQ ID NO: 53 - DNA, 20 bp, Homo sapiens
ctccaggtcatcatcagtga

SEQ ID NO: 54 - DNA, 20 bp, Homo sapiens
catcactgatgatgacctgg

SEQ ID NO: 55 - DNA, 20 bp, Homo sapiens
agtcattggcgatggcctcc

SEQ ID NO: 56 - DNA, 20 bp, Homo sapiens
ttcctctgagtcattggcga

SEQ ID NO: 57 - DNA, 20 bp, Homo sapiens
tcccatgtgtcgaagaagat

SEQ ID NO: 58 - DNA, 20 bp, Homo sapiens
aacctatcttcttcgacaca

SEQ ID NO: 59 - DNA, 20 bp, Homo sapiens
acctatcttcttcgacacat

SEQ ID NO: 60 - DNA, 20 bp, Homo sapiens
cttcgacacatgggataacg

SEQ ID NO: 61 - DNA, 20 bp, Homo sapiens
gtgcagttcagtgatcgtac

SEQ ID NO: 62 - DNA, 20 bp, Homo sapiens
gatcactgaactgcacgctc

SEQ ID NO: 63 - DNA, 20 bp, Homo sapiens
atcactgaactgcacgctcc

SEQ ID NO: 64 - DNA, 20 bp, Homo sapiens
caaaaaagcttggtgatgtc

SEQ ID NO: 65 - DNA, 20 bp, Homo sapiens
ccatatcctgtccctggagg

SEQ ID NO: 66 - DNA, 20 bp, Homo sapiens
ctgaaagctctccacctcca

SEQ ID NO: 67 - DNA, 20 bp, Homo sapiens
gctccatatcctgtccctgg

SEQ ID NO: 68 - DNA, 20 bp, Homo sapiens
agctctccacctccagggac

SEQ ID NO: 69 - DNA, 20 bp, Homo sapiens
gttgctccatatcctgtccc

SEQ ID NO: 70 - DNA, 20 bp, Homo sapiens
ggacaggatatggagcaaca

SEQ ID NO: 71 - DNA, 20 bp, Canis familiaris
gtcacagctcatatcataga

SEQ ID NO: 72 - DNA, 20 bp, Canis familiaris
acatgcagtcctcatgaagt

SEQ ID NO: 73 - DNA, 20 bp, Canis familiaris
gacatgcagtcctcatgaag

SEQ ID NO: 74 - DNA, 20 bp, Canis familiaris
gagctgtgacccacttcatg

SEQ ID NO: 75 - DNA, 20 bp, Canis familiaris
ggatgtctttgagatttcag

SEQ ID NO: 76 - DNA, 20 bp, Canis familiaris
attttccttgaaggtaagct

SEQ ID NO: 77 - DNA, 20 bp, Canis familiaris
gacatcccagcttaccttca

SEQ ID NO: 78 - DNA, 20 bp, Canis familiaris
cttcaaggaaaatgtggtag

SEQ ID NO: 79 - DNA, 20 bp, Canis familiaris
gtggtagtggtggcagccaa

SEQ ID NO: 80 - DNA, 20 bp, Canis familiaris
tggtagtggtggcagccaat

SEQ ID NO: 81 - DNA, 20 bp, Canis familiaris
cttctttagaatcttcccat

SEQ ID NO: 82 - DNA, 20 bp, Canis familiaris
ggaagattctaaagaagaga

SEQ ID NO: 83 - DNA, 20 bp, Canis familiaris
aatgtcttccaggtcatcat

SEQ ID NO: 84 - DNA, 20 bp, Canis familiaris
attcatcaccgatgatgacc

SEQ ID NO: 85 - DNA, 20 bp, Canis familiaris
attgccaatgacacagaaga

SEQ ID NO: 86 - DNA, 20 bp, Canis familiaris
cctcatctaccagagaactg

SEQ ID NO: 87 - DNA, 20 bp, Canis familiaris
ccacagttctctggtagatg

SEQ ID NO: 88 - DNA, 20 bp, Canis familiaris
cacagttctctggtagatga

SEQ ID NO: 89 - DNA, 20 bp, Canis familiaris
gctggtgggagacttgcaac

SEQ ID NO: 90 - DNA, 20 bp, Canis familiaris
actcttgttacagagctggt

SEQ ID NO: 91 - DNA, 20 bp, Canis familiaris
gactcttgttacagagctgg

SEQ ID NO: 92 - DNA, 20 bp, Canis familiaris
tcagactcttgttacagagc

SEQ ID NO: 93 - DNA, 20 bp, Canis familiaris
agctctgtaacaagagtctg

SEQ ID NO: 94 - DNA, 20 bp, Canis familiaris
cgtgtcagtcattgtagctt

SEQ ID NO: 95 - DNA, 20 bp, Canis familiaris
tcctggaggacctgtgggca

SEQ ID NO: 96 - DNA, 20 bp, Canis familiaris
gctgaagaagccctgcccac

SEQ ID NO: 97 - DNA, 20 bp, Canis familiaris
catcctcctggaggacctgt

SEQ ID NO: 98 - DNA, 20 bp, Canis familiaris
tcatcctcctggaggacctg

SEQ ID NO: 99 - DNA, 20 bp, Canis familiaris
gccctgcccacaggtcctcc

SEQ ID NO: 100 - DNA, 20 bp, Canis familiaris
ctgcccacaggtcctccagg

SEQ ID NO: 101 - DNA, 20 bp, Canis familiaris
tcttcaggtcatcctcctgg

SEQ ID NO: 102 - DNA, 20 bp, Canis familiaris
tgctcttcaggtcatcctcc

SEQ ID NO: 103 - DNA, 20 bp, Canis familiaris
tgtagcaaaagatgctcttc

SEQ ID NO: 104 - DNA, 20 bp, Canis familiaris
ttttgctacatctttgaaga

SEQ ID NO: 105 - DNA, 20 bp, Equus caballus
gtcatagcttgcatcataga

SEQ ID NO: 106 - DNA, 20 bp, Equus caballus
ccatgcagtcctcaggaagt

SEQ ID NO: 107 - DNA, 20 bp, Equus caballus
tccatgcagtcctcaggaag

SEQ ID NO: 108 - DNA, 20 bp, Equus caballus
aagctatgacccacttcctg

SEQ ID NO: 109 - DNA, 20 bp, Equus caballus
aatgtatccatgcagtcctc

SEQ ID NO: 110 - DNA, 20 bp, Equus caballus
cccacttcctgaggactgca

SEQ ID NO: 111 - DNA, 20 bp, Equus caballus
ggatgtcttagaggtttcag

SEQ ID NO: 112 - DNA, 20 bp, Equus caballus
gttcagcttggatgtcttag

SEQ ID NO: 113 - DNA, 20 bp, Equus caballus
gctctccttgaagttcagct

SEQ ID NO: 114 - DNA, 20 bp, Equus caballus
gacatccaagctgaacttca

SEQ ID NO: 115 - DNA, 20 bp, Equus caballus
gctgaacttcaaggagagcg

SEQ ID NO: 116 - DNA, 20 bp, Equus caballus
cttcaaggagagcgtggtgc

SEQ ID NO: 117 - DNA, 20 bp, Equus caballus
caaggagagcgtggtgctgg

SEQ ID NO: 118 - DNA, 20 bp, Equus caballus
gtggtgctggtggcagccaa

SEQ ID NO: 119 - DNA, 20 bp, Equus caballus
tggtgctggtggcagccaac

SEQ ID NO: 120 - DNA, 20 bp, Equus caballus
cttcttcagagtcttcccgt

SEQ ID NO: 121 - DNA, 20 bp, Equus caballus
ggaagactctgaagaagaga

SEQ ID NO: 122 - DNA, 20 bp, Equus caballus
aatggcttccaggtcatcat

SEQ ID NO: 123 - DNA, 20 bp, Equus caballus
gttcatcaccaatgatgacc

SEQ ID NO: 124 - DNA, 20 bp, Equus caballus
ttcttctggatcattggcaa

SEQ ID NO: 125 - DNA, 20 bp, Equus caballus
ggtggtgggagatttgcaac

SEQ ID NO: 126 - DNA, 20 bp, Equus caballus
agtcttgttgtagaggtggt

SEQ ID NO: 127 - DNA, 20 bp, Equus caballus
aagtcttgttgtagaggtgg

SEQ ID NO: 128 - DNA, 20 bp, Equus caballus
tgaaagtcttgttgtagagg

SEQ ID NO: 129 - DNA, 20 bp, Equus caballus
gtttgaaagtcttgttgtag

SEQ ID NO: 130 - DNA, 20 bp, Equus caballus
acatgccatgtcaatcattg

SEQ ID NO: 131 - DNA, 20 bp, Equus caballus
catgtcaatcattgtggctg

SEQ ID NO: 132 - DNA, 20 bp, Mus musculus
gccatagcttgcatcataga

SEQ ID NO: 133 - DNA, 20 bp, Mus musculus
tccttctatgatgcaagcta

SEQ ID NO: 134 - DNA, 20 bp, Mus musculus
ggacatctttgacgtttcag

SEQ ID NO: 135 - DNA, 20 bp, Mus musculus
gatgtccaacttcaccttca

SEQ ID NO: 136 - DNA, 20 bp, Mus musculus
tgtcacccggctctccttga

SEQ ID NO: 137 - DNA, 20 bp, Mus musculus
cttcaccttcaaggagagcc

SEQ ID NO: 138 - DNA, 20 bp, Mus musculus
acgttgctgatactgtcacc

SEQ ID NO: 139 - DNA, 20 bp, Mus musculus
gtatcagcaacgtcaagcaa

SEQ ID NO: 140 - DNA, 20 bp, Mus musculus
tatcagcaacgtcaagcaac

SEQ ID NO: 141 - DNA, 20 bp, Mus musculus
ggaagattctgaagaagaga

SEQ ID NO: 142 - DNA, 20 bp, Mus musculus
ctgcaggtcatcttcagtga

SEQ ID NO: 143 - DNA, 20 bp, Mus musculus
accttccagatcatgggtta

SEQ ID NO: 144 - DNA, 20 bp, Mus musculus
ctccttaccttccagatcat

SEQ ID NO: 145 - DNA, 20 bp, Mus musculus
tccataacccatgatctgga

SEQ ID NO: 146 - DNA, 20 bp, Mus musculus
aacccatgatctggaaggta

SEQ ID NO: 147 - DNA, 20 bp, Mus musculus
gacagcccaggtcaaaggtt

SEQ ID NO: 148 - DNA, 20 bp, Mus musculus
atcaggacagcccaggtcaa

SEQ ID NO: 149 - DNA, 20 bp, Mus musculus
tgcttccaaacctttgacct

SEQ ID NO: 150 - DNA, 20 bp, Mus musculus
tgctctcatcaggacagccc

SEQ ID NO: 151 - DNA, 20 bp, Mus musculus
tgaagctggatgctctcatc

SEQ ID NO: 152 - DNA, 20 bp, Mus musculus
gctgctgcgagatttgaagc

SEQ ID NO: 153 - DNA, 20 bp, Mus musculus
catcaacaagagcttcaggc

SEQ ID NO: 154 - DNA, 20 bp, Mus musculus
gcaggcagtatcactcattg

SEQ ID NO: 155 - DNA, 20 bp, Mus musculus
agtatcactcattgtggctg

SEQ ID NO: 156 - DNA, 20 bp, Mus musculus
ttgtggctgtggagaagctg

SEQ ID NO: 157 - DNA, 20 bp, Mus musculus
aaggtccacgggaaagacac

SEQ ID NO: 158 - DNA, 20 bp, Mus musculus
agctacctgtgtctttcccg

SEQ ID NO: 159 - DNA, 20 bp, Mus musculus
cctcatcctggaaggtccac

SEQ ID NO: 160 - DNA, 20 bp, Mus musculus
tcctcatcctggaaggtcca

SEQ ID NO: 161 - DNA, 20 bp, Mus musculus
gctcatgtcctcatcctgga

SEQ ID NO: 162 - DNA, 20 bp, Mus musculus
cccgtggaccttccaggatg

SEQ ID NO: 163 - DNA, 20 bp, Mus musculus
aggtgctcatgtcctcatcc

SEQ ID NO: 164 - DNA, 20 bp, Mus musculus
ttcaaagatgaaggaaaaga

SEQ ID NO: 165 - DNA, 20 bp, Mus musculus
agtaccttcttcaaagatga

SEQ ID NO: 166 - DNA, 52 bp, Artificial sequence
  Sequence is synthesized
tgctgtagtggtggtcggagattcgtagctggatgccgccatccagagggca

SEQ ID NO: 167 - DNA, 20 bp, Mus musculus
ttttccttcatctttgaaga

SEQ ID NO: 168 - RNA, 20 nt, Homo sapiens
gccauagcuuacaugauaga

SEQ ID NO: 169 - RNA, 20 nt, Homo sapiens
uccuucuaucauguaagcua

SEQ ID NO: 170 - RNA, 20 nt, Homo sapiens
ccaugcagccuucauggagu

SEQ ID NO: 171 - RNA, 20 nt, Homo sapiens
uccaugcagccuucauggag

SEQ ID NO: 172 - RNA, 20 nt, Homo sapiens
agcuauggcccacuccauga

SEQ ID NO: 173 - RNA, 20 nt, Homo sapiens
auugauccaugcagccuuca

SEQ ID NO: 174 - RNA, 20 nt, Homo sapiens
cccacuccaugaaggcugca

SEQ ID NO: 175 - RNA, 20 nt, Homo sapiens
gcucuccuugaagguaagcu

SEQ ID NO: 176 - RNA, 20 nt, Homo sapiens
uaccaccaugcucuccuuga

SEQ ID NO: 177 - RNA, 20 nt, Homo sapiens
gcuuaccuucaaggagagca

SEQ ID NO: 178 - RNA, 20 nt, Homo sapiens
uaccuucaaggagagcaugg

SEQ ID NO: 179 - RNA, 20 nt, Homo sapiens
auggugguaguagcaaccaa

SEQ ID NO: 180 - RNA, 20 nt, Homo sapiens
uggugguaguagcaaccaac

SEQ ID NO: 181 - RNA, 20 nt, Homo sapiens
cuucuucagaaccuucccgu

SEQ ID NO: 182 - RNA, 20 nt, Homo sapiens
gguaguagcaaccaacggga

SEQ ID NO: 183 - RNA, 20 nt, Homo sapiens
ggaagguucugaagaagaga

SEQ ID NO: 184 - RNA, 20 nt, Homo sapiens
cuccaggucaucaucaguga

SEQ ID NO: 185 - RNA, 20 nt, Homo sapiens
caucacugaugaugaccugg

SEQ ID NO: 186 - RNA, 20 nt, Homo sapiens
agucauuggcgauggccucc

SEQ ID NO: 187 - RNA, 20 nt, Homo sapiens
uuccucugagucauuggcga

SEQ ID NO: 188 - RNA, 20 nt, Homo sapiens
ucccaugugucgaagaagau

SEQ ID NO: 189 - RNA, 20 nt, Homo sapiens
aaccuaucuucuucgacaca

SEQ ID NO: 190 - RNA, 20 nt, Homo sapiens
accuaucuucuucgacacau

SEQ ID NO: 191 - RNA, 20 nt, Homo sapiens
cuucgacacaugggauaacg

SEQ ID NO: 192 - RNA, 20 nt, Homo sapiens
gugcaguucagugaucguac

SEQ ID NO: 193 - RNA, 20 nt, Homo sapiens
gaucacugaacugcacgcuc

SEQ ID NO: 194 - RNA, 20 nt, Homo sapiens
aucacugaacugcacgcucc

SEQ ID NO: 195 - RNA, 20 nt, Homo sapiens
caaaaaagcuuggugauguc

SEQ ID NO: 196 - RNA, 20 nt, Homo sapiens
ccauauccugucccuggagg

SEQ ID NO: 197 - RNA, 20 nt, Homo sapiens
cugaaagcucuccaccucca

SEQ ID NO: 198 - RNA, 20 nt, Homo sapiens
gcuccauauccugucccugg

SEQ ID NO: 199 - RNA, 20 nt, Homo sapiens
agcucuccaccuccagggac

SEQ ID NO: 200 - RNA, 20 nt, Homo sapiens
guugcuccauauccuguccc

SEQ ID NO: 201 - RNA, 20 nt, Homo sapiens
ggacaggauauggagcaaca

SEQ ID NO: 202 - RNA, 20 nt, Canis familiaris
gucacagcucauaucauaga

SEQ ID NO: 203 - RNA, 20 nt, Canis familiaris
acaugcaguccucaugaagu

SEQ ID NO: 204 - RNA, 20 nt, Canis familiaris
gacaugcaguccucaugaag

SEQ ID NO: 205 - RNA, 20 nt, Canis familiaris
gagcugugacccacuucaug

SEQ ID NO: 206 - RNA, 20 nt, Canis familiaris
ggaugucuuugagauuucag

SEQ ID NO: 207 - RNA, 20 nt, Canis familiaris
auuuuccuugaagguaagcu

SEQ ID NO: 208 - RNA, 20 nt, Canis familiaris
gacaucccagcuuaccuuca

SEQ ID NO: 209 - RNA, 20 nt, Canis familiaris
cuucaaggaaaaugugguag

SEQ ID NO: 210 - RNA, 20 nt, Canis familiaris
gugguagugguggcagccaa

SEQ ID NO: 211 - RNA, 20 nt, Canis familiaris
ugguagugguggcagccaau

SEQ ID NO: 212 - RNA, 20 nt, Canis familiaris
cuucuuuagaaucuucccau

SEQ ID NO: 213 - RNA, 20 nt, Canis familiaris
ggaagauucuaaagaagaga

SEQ ID NO: 214 - RNA, 20 nt, Canis familiaris
aaugucuuccaggucaucau

SEQ ID NO: 215 - RNA, 20 nt, Canis familiaris
auucaucaccgaugaugacc

SEQ ID NO: 216 - RNA, 20 nt, Canis familiaris
auugccaaugacacagaaga

SEQ ID NO: 217 - RNA, 20 nt, Canis familiaris
ccucaucuaccagagaacug

SEQ ID NO: 218 - RNA, 20 nt, Canis familiaris
ccacaguucucugguagaug

SEQ ID NO: 219 - RNA, 20 nt, Canis familiaris
cacaguucucugguagauga

SEQ ID NO: 220 - RNA, 20 nt, Canis familiaris
gcuggugggagacuugcaac

SEQ ID NO: 221 - RNA, 20 nt, Canis familiaris
acucuuguuacagagcuggu

SEQ ID NO: 222 - RNA, 20 nt, Canis familiaris
gacucuuguuacagagcugg

SEQ ID NO: 223 - RNA, 20 nt, Canis familiaris
ucagacucuuguuacagagc

SEQ ID NO: 224 - RNA, 20 nt, Canis familiaris
agcucuguaacaagagucug

SEQ ID NO: 225 - RNA, 20 nt, Canis familiaris
cgugucagucauuguagcuu

SEQ ID NO: 226 - RNA, 20 nt, Canis familiaris
uccuggaggaccugugggca

SEQ ID NO: 227 - RNA, 20 nt, Canis familiaris
gcugaagaagcccugcccac

SEQ ID NO: 228 - RNA, 20 nt, Canis familiaris
cauccuccuggaggaccugu

SEQ ID NO: 229 - RNA, 20 nt, Canis familiaris
ucauccuccuggaggaccug

SEQ ID NO: 230 - RNA, 20 nt, Canis familiaris
gcccugcccacagguccucc

SEQ ID NO: 231 - RNA, 20 nt, Canis familiaris
cugcccacagguccuccagg

SEQ ID NO: 232 - RNA, 20 nt, Canis familiaris
ucuucaggucauccuccugg

SEQ ID NO: 233 - RNA, 20 nt, Canis familiaris
ugcucuucaggucauccucc

SEQ ID NO: 234 - RNA, 20 nt, Canis familiaris
uguagcaaaagaugcucuuc

SEQ ID NO: 235 - RNA, 20 nt, Canis familiaris
uuuugcuacaucuuugaaga

SEQ ID NO: 236 - RNA, 20 nt, Equus caballus
gucauagcuugcaucauaga

SEQ ID NO: 237 - RNA, 20 nt, Equus caballus
ccaugcaguccucaggaagu

SEQ ID NO: 238 - RNA, 20 nt, Equus caballus
uccaugcaguccucaggaag

SEQ ID NO: 239 - RNA, 20 nt, Equus caballus
aagcuaugacccacuuccug

SEQ ID NO: 240 - RNA, 20 nt, Equus caballus
aauguauccaugcaguccuc

SEQ ID NO: 241 - RNA, 20 nt, Equus caballus
cccacuuccugaggacugca

SEQ ID NO: 242 - RNA, 20 nt, Equus caballus
ggaugucuuagagguuucag

SEQ ID NO: 243 - RNA, 20 nt, Equus caballus
guucagcuuggaugucuuag

SEQ ID NO: 244 - RNA, 20 nt, Equus caballus
gcucuccuugaaguucagcu

SEQ ID NO: 245 - RNA, 20 nt, Equus caballus
gacauccaagcugaacuuca

SEQ ID NO: 246 - RNA, 20 nt, Equus caballus
gcugaacuucaaggagagcg

SEQ ID NO: 247 - RNA, 20 nt, Equus caballus
cuucaaggagagcguggugc

SEQ ID NO: 248 - RNA, 20 nt, Equus caballus
caaggagagcguggugcugg

SEQ ID NO: 249 - RNA, 20 nt, Equus caballus
guggugcugguggcagccaa

SEQ ID NO: 250 - RNA, 20 nt, Equus caballus
uggugcugguggcagccaac

SEQ ID NO: 251 - RNA, 20 nt, Equus caballus
cuucuucagagucuucccgu

SEQ ID NO: 252 - RNA, 20 nt, Equus caballus
ggaagacucugaagaagaga

SEQ ID NO: 253 - RNA, 20 nt, Equus caballus
aauggcuuccaggucaucau

SEQ ID NO: 254 - RNA, 20 nt, Equus caballus
guucaucaccaaugaugacc

SEQ ID NO: 255 - RNA, 20 nt, Equus caballus
uucuucuggaucauuggcaa

SEQ ID NO: 256 - RNA, 20 nt, Equus caballus
gguggugggagauuugcaac

SEQ ID NO: 257 - RNA, 20 nt, Equus caballus
agucuuguuguagagguggu

SEQ ID NO: 258 - RNA, 20 nt, Equus caballus
aagucuuguuguagaggugg

SEQ ID NO: 259 - RNA, 20 nt, Equus caballus
ugaaagucuuguuguagagg

SEQ ID NO: 260 - RNA, 20 nt, Equus caballus
guuugaaagucuuguuguag

SEQ ID NO: 261 - RNA, 20 nt, Equus caballus
acaugccaugucaaucauug

SEQ ID NO: 262 - RNA, 20 nt, Equus caballus
caugucaaucauuguggcug

SEQ ID NO: 263 - RNA, 20 nt, Homo sapiens
ugagcccgggcgugcuggca

SEQ ID NO: 264 - RNA, 20 nt, Mus musculus
uccuucuaugaugcaagcua

SEQ ID NO: 265 - RNA, 20 nt, Mus musculus
ggacaucuuugacguuucag

SEQ ID NO: 266 - RNA, 20 nt, Mus musculus
gauguccaacuucaccuuca

SEQ ID NO: 267 - RNA, 20 nt, Mus musculus
ugucacccggcucuccuuga

SEQ ID NO: 268 - RNA, 20 nt, Mus musculus
cuucaccuucaaggagagcc

SEQ ID NO: 269 - RNA, 20 nt, Mus musculus
acguugcugauacugucacc

SEQ ID NO: 270 - RNA, 20 nt, Homo sapiens
aggcccaggcccagagcggu

SEQ ID NO: 271 - RNA, 20 nt, Mus musculus
uaucagcaacgucaagcaac

SEQ ID NO: 272 - RNA, 20 nt, Mus musculus
ggaagauucugaagaagaga

SEQ ID NO: 273 - RNA, 20 nt, Homo sapiens
caguugcucuacggugagcc

SEQ ID NO: 274 - RNA, 20 nt, Mus musculus
accuuccagaucauggguua

SEQ ID NO: 275 - RNA, 20 nt, Mus musculus
cuccuuaccuuccagaucau

SEQ ID NO: 276 - RNA, 20 nt, Mus musculus
uccauaacccaugaucugga

SEQ ID NO: 277 - RNA, 20 nt, Mus musculus
aacccaugaucuggaaggua

SEQ ID NO: 278 - RNA, 20 nt, Mus musculus
gacagcccaggucaaagguu

SEQ ID NO: 279 - RNA, 20 nt, Mus musculus
aucaggacagcccaggucaa

SEQ ID NO: 280 - RNA, 20 nt, Mus musculus
ugcuuccaaaccuuugaccu

SEQ ID NO: 281 - RNA, 20 nt, Homo sapiens
ccacuuacagccagcaggag

SEQ ID NO: 282 - RNA, 20 nt, Mus musculus
ugaagcuggaugcucucauc

SEQ ID NO: 283 - RNA, 20 nt, Mus musculus
gcugcugcgagauuugaagc

SEQ ID NO: 284 - RNA, 20 nt, Homo sapiens
acgaucccugccagcacgcc

SEQ ID NO: 285 - RNA, 20 nt, Mus musculus
gcaggcaguaucacucauug

SEQ ID NO: 286 - RNA, 20 nt, Mus musculus
aguaucacucauuguggcug

SEQ ID NO: 287 - RNA, 20 nt, Mus musculus
uuguggcuguggagaagcug

SEQ ID NO: 288 - RNA, 20 nt, Mus musculus
aagguccacgggaaagacac

SEQ ID NO: 289 - RNA, 20 nt, Mus musculus
agcuaccugugucuuucccg

SEQ ID NO: 290 - RNA, 20 nt, Homo sapiens
caaugagcacugucagcacc

SEQ ID NO: 291 - RNA, 20 nt, Mus musculus
uccucauccuggaaggucca

SEQ ID NO: 292 - RNA, 20 nt, Homo sapiens
aggagcaggagccugcugca

SEQ ID NO: 293 - RNA, 20 nt, Mus musculus
cccguggaccuuccaggaug

SEQ ID NO: 294 - RNA, 20 nt, Mus musculus
aggugcucauguccucaucc

SEQ ID NO: 295 - RNA, 20 nt, Mus musculus
uucaaagaugaaggaaaaga

SEQ ID NO: 296 - RNA, 20 nt, Mus musculus
aguaccuucuucaaagauga

SEQ ID NO: 297 - RNA, 20 nt, Mus musculus
uuuuccuucaucuuugaaga

SEQ ID NO: 298 - RNA, 20 nt, Homo sapiens
ucaccagugaaauuugacau

SEQ ID NO: 299 - RNA, 20 nt, Homo sapiens
cgaucccugccagcacgccc

SEQ ID NO: 300 - RNA, 20 nt, Homo sapiens
agccaaugaucaguaccuca

SEQ ID NO: 301 - RNA, 20 nt, Homo sapiens
cagagacagaugaucaaugg

SEQ ID NO: 302 - RNA, 20 nt, Homo sapiens
ugagacuccagaccuacgcc

SEQ ID NO: 303 - RNA, 20 nt, Homo sapiens
uucaccagugaaauuugaca

SEQ ID NO: 304 - RNA, 20 nt, Homo sapiens
uuuuagaaaucaucaagccu

SEQ ID NO: 305 - RNA, 20 nt, Homo sapiens
uauguaaugcagcagccgug

SEQ ID NO: 306 - RNA, 20 nt, Homo sapiens
ggcccaggaaguacacggcc

SEQ ID NO: 307 - RNA, 20 nt, Homo sapiens
ggccaucgccaaugacucag

SEQ ID NO: 308 - RNA, 20 nt, Homo sapiens
augugaaauacaacuuuaug

SEQ ID NO: 309 - RNA, 20 nt, Homo sapiens
gcugacagugcucauugccc

SEQ ID NO: 310 - RNA, 20 nt, Homo sapiens
ugggucuaggccuaccgcuc

SEQ ID NO: 311 - RNA, 20 nt, Homo sapiens
aucugaaagucagugauaga

SEQ ID NO: 312 - RNA, 20 nt, Homo sapiens
agccgugagguacugaucau

SEQ ID NO: 313 - RNA, 20 nt, Homo sapiens
auucagagacagaugaucaa

SEQ ID NO: 314 - RNA, 20 nt, Homo sapiens
ugaaagucagugauagaggg

SEQ ID NO: 315 - RNA, 20 nt, Homo sapiens
uggcaauaaacaaguuugga

SEQ ID NO: 316 - RNA, 20 nt, Homo sapiens
gcacccaugucaaauuucac

SEQ ID NO: 317 - RNA, 20 nt, Homo sapiens
cagccggcccaggaaguaca

SEQ ID NO: 318 - RNA, 20 nt, Homo sapiens
aucgccaaugacucagagga

SEQ ID NO: 319 - RNA, 20 nt, Homo sapiens
cucuucuucugggaaacuca

SEQ ID NO: 320 - RNA, 20 nt, Homo sapiens
aagcuaaaaggugcugaccu

SEQ ID NO: 321 - RNA, 20 nt, Homo sapiens
cucgaauuauacuuugauug

SEQ ID NO: 322 - RNA, 20 nt, Homo sapiens
uggaaaaccaggcguagguc

SEQ ID NO: 323 - RNA, 20 nt, Homo sapiens
aggccuaccgcucugggccu

SEQ ID NO: 324 - DNA, 20 bp, Homo sapiens
gttggtctcactacctgtga

SEQ ID NO: 325 - RNA, 20 nt, Homo sapiens
acaggcucgccccuagacaa

SEQ ID NO: 326 - DNA, 20 bp, Homo sapiens
gatactggaaaaccaggcgt

SEQ ID NO: 327 - RNA, 20 nt, Homo sapiens
gcgccggccccuuugucuag

SEQ ID NO: 328 - DNA, 20 bp, Homo sapiens
agaccaaccagtgctgctga

SEQ ID NO: 329 - DNA, 20 bp, Homo sapiens
tatctgaaagtcagtgatag

SEQ ID NO: 330 - DNA, 20 bp, Homo sapiens
ggcaataaacaagtttggat

SEQ ID NO: 331 - RNA, 20 nt, Homo sapiens
agagcugacccggugcgggu

SEQ ID NO: 332 - DNA, 20 bp, Homo sapiens
gagatacccaaaaccatcac

SEQ ID NO: 333 - DNA, 20 bp, Homo sapiens
ttttgagattcttagaatca

SEQ ID NO: 334 - DNA, 20 bp, Homo sapiens
ttgccacaaagcaagactac

SEQ ID NO: 335 - DNA, 20 bp, Homo sapiens
tgaccttcagcagcactggt

SEQ ID NO: 336 - DNA, 20 bp, Homo sapiens
ctttcagatactggaaaacc

SEQ ID NO: 337 - RNA, 20 nt, Homo sapiens
cccugacucccacccgcacc

SEQ ID NO: 338 - DNA, 20 bp, Homo sapiens
ggtaagcttggatgttttag

SEQ ID NO: 339 - DNA, 20 bp, Homo sapiens
ttacataatctggatgaagc

SEQ ID NO: 340 - DNA, 20 bp, Homo sapiens
ggctgctgcattacataatc

SEQ ID NO: 341 - DNA, 20 bp, Homo sapiens
acattgctcaggaagctaaa

SEQ ID NO: 342 - RNA, 20 nt, Homo sapiens
caggcucgccccuagacaaa

SEQ ID NO: 343 - DNA, 20 bp, Homo sapiens
tttgtggcaataaacaagtt

SEQ ID NO: 344 - DNA, 20 bp, Homo sapiens
ctccaggtcatcatcagtga

SEQ ID NO: 345 - DNA, 20 bp, Homo sapiens
cacccagtagtcttgctttg

SEQ ID NO: 346 - DNA, 20 bp, Homo sapiens
gagtttcccagaagaagagg

SEQ ID NO: 347 - DNA, 20 bp, Homo sapiens
agttgtatttcacattgctc

SEQ ID NO: 348 - DNA, 20 bp, Homo sapiens
ggtcatcatcagtgatggat

SEQ ID NO: 349 - DNA, 20 bp, Homo sapiens
ttcaaacatgtctggaactt

SEQ ID NO: 350 - RNA, 20 nt, Homo sapiens
gggcagagcugacccggugc

SEQ ID NO: 351 - DNA, 20 bp, Homo sapiens
tccatgcagccttcatggag

SEQ ID NO: 352 - DNA, 20 bp, Homo sapiens
tcgaattatactttgattga

SEQ ID NO: 353 - DNA, 20 bp, Homo sapiens
ggaaggttctgaagaagaga

SEQ ID NO: 354 - DNA, 20 bp, Homo sapiens
ttcaggtcttcaaacatgtc

SEQ ID NO: 355 - DNA, 20 bp, Homo sapiens
actactgggtgtgcttggca

SEQ ID NO: 356 - DNA, 20 bp, Homo sapiens
aacatccaagcttaccttca

SEQ ID NO: 357 - DNA, 20 bp, Homo sapiens
cgtgagtttcccagaagaag

SEQ ID NO: 358 - DNA, 20 bp, Homo sapiens
tttgattgagggcgtcattc

SEQ ID NO: 359 - DNA, 20 bp, Homo sapiens
atccatcactgatgatgacc

SEQ ID NO: 360 - DNA, 20 bp, Homo sapiens
ttcccagaagaagaggaggt

SEQ ID NO: 361 - RNA, 20 nt, Homo sapiens
ggagcagacuggugcagccu

SEQ ID NO: 362 - DNA, 20 bp, Homo sapiens
actgggtgtgcttggcaggg

SEQ ID NO: 363 - DNA, 20 bp, Homo sapiens
gggtgcttataagtcatcaa

SEQ ID NO: 364 - DNA, 20 bp, Homo sapiens
tgatcatctgtctctgaatc

SEQ ID NO: 365 - DNA, 20 bp, Homo sapiens
ctgaagaactgttacaggta

SEQ ID NO: 366 - DNA, 20 bp, Homo sapiens
aagacctgaagaactgttac

SEQ ID NO: 367 - DNA, 20 bp, Homo sapiens
taccaccatgctctccttga

SEQ ID NO: 368 - DNA, 20 bp, Homo sapiens
gcaagactactgggtgtgct

SEQ ID NO: 369 - DNA, 20 bp, Homo sapiens
attgatccatgcagccttca

SEQ ID NO: 370 - DNA, 20 bp, Homo sapiens
caatgactcagaggaaggta

SEQ ID NO: 371 - DNA, 20 bp, Homo sapiens
cttaccttcctctgagtcat

SEQ ID NO: 372 - DNA, 20 bp, Homo sapiens
tatcactgactttcagatac

SEQ ID NO: 373 - RNA, 20 nt, Homo sapiens
ucuggguagcagaccccgcc

SEQ ID NO: 374 - DNA, 20 bp, Homo sapiens
ctcactacctgtgatggttt

SEQ ID NO: 375 - DNA, 20 bp, Homo sapiens
tcactacctgtgatggtttt

SEQ ID NO: 376 - DNA, 20 bp, Homo sapiens
cactggttggtcttcatctt

SEQ ID NO: 377 - DNA, 20 bp, Homo sapiens
cttacctgtaacagttcttc

SEQ ID NO: 378 - RNA, 20 nt, Homo sapiens
ggggucugcuacccagagcc

SEQ ID NO: 379 - DNA, 20 bp, Homo sapiens
tgccacaaagcaagactact

SEQ ID NO: 380 - DNA, 20 bp, Homo sapiens
gactactgggtgtgcttggc

SEQ ID NO: 381 - DNA, 20 bp, Homo sapiens
caactgaccttcagcagcac

SEQ ID NO: 382 - DNA, 20 bp, Homo sapiens
ctactgggtgtgcttggcag

SEQ ID NO: 383 - DNA, 20 bp, Homo sapiens
tactgggtgtgcttggcagg

SEQ ID NO: 384 - DNA, 20 bp, Homo sapiens
gcactggttggtcttcatct

SEQ ID NO: 385 - DNA, 20 bp, Homo sapiens
gaccaacctcctcttcttct

SEQ ID NO: 386 - DNA, 20 bp, Homo sapiens
gtgatggttttgggtatctc

SEQ ID NO: 387 - DNA, 20 bp, Homo sapiens
agaccaacctcctcttcttc

SEQ ID NO: 388 - RNA, 20 nt, Homo sapiens
gggcgucugggcagcugagu

SEQ ID NO: 389 - RNA, 20 nt, Homo sapiens
cgcgccggccccuuugucua

SEQ ID NO: 390 - RNA, 20 nt, Homo sapiens
cauggccacaacaacugacg

SEQ ID NO: 391 - RNA, 20 nt, Homo sapiens
gguggucggagauucguagc

SEQ ID NO: 392 - RNA, 20 nt, Homo sapiens
ggacucacagcaaaaaagcu

SEQ ID NO: 393 - RNA, 20 nt, Homo sapiens
ucgccccuagacaaaggggc

SEQ ID NO: 394 - RNA, 20 nt, Homo sapiens
aggugcugauguaccaguug

SEQ ID NO: 395 - RNA, 20 nt, Homo sapiens
cuuaucaucuuucaacacgc

SEQ ID NO: 396 - RNA, 20 nt, Homo sapiens
uccgaccaccacuacagcaa

SEQ ID NO: 397 - RNA, 20 nt, Homo sapiens
guaauaagccaucauuucac

SEQ ID NO: 398 - RNA, 20 nt, Homo sapiens
gaggugcugauguaccaguu

SEQ ID NO: 399 - RNA, 20 nt, Homo sapiens
ugggcgucugggcagcugag

SEQ ID NO: 400 - RNA, 20 nt, Homo sapiens
gcccugacucccacccgcac

SEQ ID NO: 401 - RNA, 20 nt, Homo sapiens
uuuuuauuacaguggcaaug

SEQ ID NO: 402 - RNA, 20 nt, Homo sapiens
uucuccauguccuuuguaca

SEQ ID NO: 403 - RNA, 20 nt, Homo sapiens
aaguaaugacaaaauaccug

SEQ ID NO: 404 - RNA, 20 nt, Homo sapiens
aacaugcccgucuuccuggg

SEQ ID NO: 405 - RNA, 20 nt, Homo sapiens
cagagcugacccggugcggg

SEQ ID NO: 406 - RNA, 20 nt, Homo sapiens
uuaggaagacacaaauugca

SEQ ID NO: 407 - RNA, 20 nt, Homo sapiens
gagcucagguacuucugcca

SEQ ID NO: 408 - RNA, 20 nt, Homo sapiens
uucuccuuguacaaaggaca

SEQ ID NO: 409 - RNA, 20 nt, Homo sapiens
cggagcagacuggugcagcc

SEQ ID NO: 410 - RNA, 20 nt, Homo sapiens
ugaagggaaagaaggugcuc

SEQ ID NO: 411 - RNA, 20 nt, Homo sapiens
caucuuucaacacgcaggac

SEQ ID NO: 412 - RNA, 20 nt, Homo sapiens
cuccgaccaccacuacagca

SEQ ID NO: 413 - RNA, 20 nt, Homo sapiens
ugauaagcccacucuacagc

SEQ ID NO: 414 - RNA, 20 nt, Homo sapiens
gcaggccgcgucaguuguug

SEQ ID NO: 415 - RNA, 20 nt, Homo sapiens
uaagcccacucuacagcugg

SEQ ID NO: 416 - RNA, 20 nt, Homo sapiens
cuuaccuccagcuguagagu

SEQ ID NO: 417 - RNA, 20 nt, Homo sapiens
cgcccagcgcucugagcgcg

SEQ ID NO: 418 - RNA, 20 nt, Homo sapiens
uuucccuucaucuuugaaga

SEQ ID NO: 419 - RNA, 20 nt, Homo sapiens
gcccuugcuguagugguggu

SEQ ID NO: 420 - RNA, 20 nt, Homo sapiens
gcuggaugccgccauccaga

SEQ ID NO: 421 - RNA, 20 nt, Homo sapiens
uuccugggagggaccaaagg

SEQ ID NO: 422 - RNA, 20 nt, Homo sapiens
acuuaccuccagcuguagag

SEQ ID NO: 423 - RNA, 20 nt, Homo sapiens
uuguggccauggacaagcug

SEQ ID NO: 424 - RNA, 20 nt, Homo sapiens
gaaaacaugcccgucuuccu

SEQ ID NO: 425 - RNA, 20 nt, Homo sapiens
gggcauguuuucugcuugag

SEQ ID NO: 426 - RNA, 20 nt, Homo sapiens
uggugaagucaguuauaucc

SEQ ID NO: 427 - RNA, 20 nt, Homo sapiens
ugggcagagcugacccggug

SEQ ID NO: 428 - RNA, 20 nt, Homo sapiens
ugaagcccuugcuguagugg

SEQ ID NO: 429 - RNA, 20 nt, Homo sapiens
ugagcucgccagugaaauga

SEQ ID NO: 430 - RNA, 20 nt, Homo sapiens
gcucagagcgcugggcgucu

SEQ ID NO: 431 - RNA, 20 nt, Homo sapiens
aucauuucacuggcgagcuc

SEQ ID NO: 432 - RNA, 20 nt, Homo sapiens
uuggucccucccaggaagac

SEQ ID NO: 433 - RNA, 20 nt, Homo sapiens
gaccucugcccucuggaugg

SEQ ID NO: 434 - RNA, 20 nt, Homo sapiens
acuaccuucuucaaagauga

SEQ ID NO: 435 - RNA, 20 nt, Homo sapiens
gugaaaugauggcuuauuac

SEQ ID NO: 436 - RNA, 20 nt, Homo sapiens
agcuuuuuugcugugagucc

SEQ ID NO: 437 - RNA, 20 nt, Homo sapiens
acaugcccgucuuccuggga

SEQ ID NO: 438 - RNA, 20 nt, Homo sapiens
gguacagauucuuuuccuug

SEQ ID NO: 439 - RNA, 20 nt, Homo sapiens
agcuggaugccgccauccag

SEQ ID NO: 440 - RNA, 20 nt, Homo sapiens
agguccuggaaggagcacug

SEQ ID NO: 441 - RNA, 20 nt, Homo sapiens
agaggugcugauguaccagu

SEQ ID NO: 442 - RNA, 20 nt, Homo sapiens
cuacagcaagggcuucaggc

SEQ ID NO: 443 - RNA, 20 nt, Homo sapiens
ugacaaaauaccuguggccu

SEQ ID NO: 444 - RNA, 20 nt, Homo sapiens
acugaaagcucuccaccucc

SEQ ID NO: 445 - RNA, 20 nt, Homo sapiens
acuuucuucuccuuguacaa

SEQ ID NO: 446 - RNA, 20 nt, Homo sapiens
cuaccuucuucaaagaugaa

SEQ ID NO: 447 - RNA, 20 nt, Homo sapiens
ggacaagcugaggaagaugc

SEQ ID NO: 448 - RNA, 20 nt, Homo sapiens
ugccgccauccagagggcag

SEQ ID NO: 449 - RNA, 20 nt, Homo sapiens
uggagagcuuucaguucaua

SEQ ID NO: 450 - RNA, 20 nt, Homo sapiens
gauguaccaguuggggaacu

SEQ ID NO: 451 - RNA, 20 nt, Homo sapiens
uccuugaggcccaaggccac

SEQ ID NO: 452 - RNA, 20 nt, Homo sapiens
gcucaggucauucuccugga

SEQ ID NO: 453 - RNA, 20 nt, Homo sapiens
agucuuaccuucaucuguuu

SEQ ID NO: 454 - RNA, 20 nt, Homo sapiens
cccggugcgggugggaguca

SEQ ID NO: 455 - RNA, 20 nt, Homo sapiens
agaaaacaugcccgucuucc

SEQ ID NO: 456 - RNA, 20 nt, Homo sapiens
auucuuuuccuugaggccca

SEQ ID NO: 457 - RNA, 20 nt, Homo sapiens
caucuuccucagcuugucca

SEQ ID NO: 458 - RNA, 20 nt, Homo sapiens
cugagugggcagagcugacc

SEQ ID NO: 459 - RNA, 20 nt, Homo sapiens
ucauucuccuggaaggucug

SEQ ID NO: 460 - RNA, 20 nt, Homo sapiens
cauucuccuggaaggucugu

SEQ ID NO: 461 - RNA, 20 nt, Homo sapiens
cucuccgcagugcuccuucc

SEQ ID NO: 462 - RNA, 20 nt, Homo sapiens
ugauggcccuaaacagauga

SEQ ID NO: 463 - RNA, 20 nt, Homo sapiens
aggugcucaggucauucucc

SEQ ID NO: 464 - RNA, 20 nt, Homo sapiens
aaauuacccaaagaagaaga

SEQ ID NO: 465 - RNA, 20 nt, Homo sapiens
uucaaagaugaagggaaaga

SEQ ID NO: 466 - RNA, 20 nt, Homo sapiens
cuggaccucugcccucugga

SEQ ID NO: 467 - RNA, 20 nt, Homo sapiens
gauagaaaucaauaacaagc

SEQ ID NO: 468 - RNA, 20 nt, Homo sapiens
accacuacagcaagggcuuc

SEQ ID NO: 469 - RNA, 20 nt, Homo sapiens
agucugcccaguuccccaac

SEQ ID NO: 470 - RNA, 20 nt, Homo sapiens
uccuggaaggucugugggca

SEQ ID NO: 471 - RNA, 20 nt, Homo sapiens
gucuuccugggagggaccaa

SEQ ID NO: 472 - RNA, 20 nt, Homo sapiens
ugauguaccaguuggggaac

SEQ ID NO: 473 - RNA, 20 nt, Homo sapiens
gucuuaccuucaucuguuua

SEQ ID NO: 474 - RNA, 20 nt, Homo sapiens
accuguggccuugggccuca

SEQ ID NO: 475 - RNA, 20 nt, Homo sapiens
uuuggucccucccaggaaga

SEQ ID NO: 476 - RNA, 20 nt, Homo sapiens
gccugaagcccuugcuguag

SEQ ID NO: 477 - RNA, 20 nt, Homo sapiens
gcagagguccagguccugga

SEQ ID NO: 478 - RNA, 20 nt, Homo sapiens
ccaccuccagggacaggaua

SEQ ID NO: 479 - RNA, 20 nt, Homo sapiens
ggccgcgcgcucagagcgcu

SEQ ID NO: 480 - RNA, 20 nt, Homo sapiens
ucccugcccacagaccuucc

SEQ ID NO: 481 - RNA, 20 nt, Homo sapiens
gcagugcuccuuccaggacc

SEQ ID NO: 482 - RNA, 20 nt, Homo sapiens
acccggugcgggugggaguc

SEQ ID NO: 483 - RNA, 20 nt, Homo sapiens
gacaaaauaccuguggccuu

SEQ ID NO: 484 - RNA, 20 nt, Homo sapiens
cuccuggaaggucugugggc

SEQ ID NO: 485 - RNA, 20 nt, Homo sapiens
cgcgucaguuguuguggcca

SEQ ID NO: 486 - RNA, 20 nt, Homo sapiens
aguuauauccuggccgccuu

SEQ ID NO: 487 - RNA, 20 nt, Homo sapiens
ggccgccuuuggucccuccc

SEQ ID NO: 488 - RNA, 20 nt, Homo sapiens
cauccagagggcagaggucc

SEQ ID NO: 489 - RNA, 20 nt, Homo sapiens
gagggcagagguccaggucc

SEQ ID NO: 490 - DNA, 20 bp, Homo sapiens
gggagggaccaaaggcggcc

SEQ ID NO: 491 - RNA, 20 nt, Homo sapiens
gacuuguucuuugaagcuga

SEQ ID NO: 492 - RNA, 20 nt, Homo sapiens
cgcuuuuccaucuucuucuu

SEQ ID NO: 493 - RNA, 20 nt, Homo sapiens
ggaccuggaccucugcccuc

SEQ ID NO: 494 - RNA, 20 nt, Homo sapiens
cuucuucuuuggguaauuuu

SEQ ID NO: 495 - RNA, 20 nt, Homo sapiens
gcuuuuccaucuucuucuuu

SEQ ID NO: 496 - RNA, 20 nt, Homo sapiens
uucuucuuuggguaauuuuu

SEQ ID NO: 497 - RNA, 20 nt, Canis familiaris
gaaaugugaaggugagacca

SEQ ID NO: 498 - RNA, 20 nt, Canis familiaris
ugauggcccuggaaauguga

SEQ ID NO: 499 - RNA, 20 nt, Canis familiaris
ggucucaccuucacauuucc

SEQ ID NO: 500 - RNA, 20 nt, Canis familiaris
gucucaccuucacauuucca

SEQ ID NO: 501 - RNA, 20 nt, Canis familiaris
aaaugugaaggugagaccau

SEQ ID NO: 502 - RNA, 20 nt, Canis familiaris
gaccuauucuuugaagcuga

SEQ ID NO: 503 - RNA, 20 nt, Canis familiaris
uucuuugaagcugauggccc

SEQ ID NO: 504 - RNA, 20 nt, Canis familiaris
ggccaucagcuucaaagaau

SEQ ID NO: 505 - RNA, 20 nt, Homo sapiens
gcgcucugagcgcgcggccc

SEQ ID NO: 506 - RNA, 20 nt, Canis familiaris
acucuuguuacagagcuggu

SEQ ID NO: 507 - RNA, 20 nt, Homo sapiens
gggccgcgcgcucagagcgc

SEQ ID NO: 508 - RNA, 20 nt, Canis familiaris
agaccugaaccacaguucuc

SEQ ID NO: 509 - RNA, 20 nt, Homo sapiens
gacccucgguccucgcucag

SEQ ID NO: 510 - RNA, 20 nt, Homo sapiens
gggcagcgguuacaguugug

SEQ ID NO: 511 - RNA, 20 nt, Canis familiaris
aggucuuggcagcagcacug

SEQ ID NO: 512 - RNA, 20 nt, Homo sapiens
cugugcccgccggaccgaga

SEQ ID NO: 513 - RNA, 20 nt, Homo sapiens
gaaugaaucaaaaucacugc

SEQ ID NO: 514 - RNA, 20 nt, Canis familiaris
gagaacugugguucaggucu

SEQ ID NO: 515 - RNA, 20 nt, Canis familiaris
gcagcacuguggagagacca

SEQ ID NO: 516 - RNA, 20 nt, Homo sapiens
ggccgcugagcgaggaccga

SEQ ID NO: 517 - RNA, 20 nt, Canis familiaris
cuaccagagaacugugguuc

SEQ ID NO: 518 - RNA, 20 nt, Homo sapiens
cacaacuguaaccgcugccc

SEQ ID NO: 519 - RNA, 20 nt, Homo sapiens
gggccgcugagcgaggaccg

SEQ ID NO: 520 - RNA, 20 nt, Homo sapiens
uccacucagucuuugacccu

SEQ ID NO: 521 - RNA, 20 nt, Homo sapiens
ccgcccgcuccuucucgguc

SEQ ID NO: 522 - DNA, 20 bp, Homo sapiens
cccgccggaccgagaaggag

SEQ ID NO: 523 - RNA, 20 nt, Homo sapiens
cccgcuccuucucgguccgg

SEQ ID NO: 524 - RNA, 20 nt, Homo sapiens
ucgguccucgcucagcggcc

SEQ ID NO: 525 - RNA, 20 nt, Canis familiaris
cuccuggaggaccugugggc

SEQ ID NO: 526 - RNA, 20 nt, Canis familiaris
cugcccacagguccuccagg

SEQ ID NO: 527 - DNA, 20 bp, Homo sapiens
ccggaccgagaaggagcggg

SEQ ID NO: 528 - RNA, 20 nt, Homo sapiens
uuacaguugugcggccugcc

SEQ ID NO: 529 - DNA, 20 bp, Homo sapiens
ccgccggaccgagaaggagc

SEQ ID NO: 530 - RNA, 20 nt, Canis familiaris
ugaugcagccaugcaaucgg

SEQ ID NO: 531 - RNA, 20 nt, Canis familiaris
cuugcaguccaccgauugca

SEQ ID NO: 532 - RNA, 20 nt, Canis familiaris
aucgguggacugcaaguuac

SEQ ID NO: 533 - RNA, 20 nt, Canis familiaris
gugaacaaacaagguaacgg

SEQ ID NO: 534 - RNA, 20 nt, Canis familiaris
cuucgggcucuccaccucaa

SEQ ID NO: 535 - RNA, 20 nt, Canis familiaris
ucgggcucuccaccucaaug

SEQ ID NO: 536 - RNA, 20 nt, Canis familiaris
ggacauaagccacaaauacc

SEQ ID NO: 537 - RNA, 20 nt, Canis familiaris
uagacagcaccagguauuug

SEQ ID NO: 538 - RNA, 20 nt, Canis familiaris
gagugaugcagccaugcaau

SEQ ID NO: 539 - RNA, 20 nt, Canis familiaris
uucgggcucuccaccucaau

SEQ ID NO: 540 - RNA, 20 nt, Canis familiaris
ugugaacaaacaagguaacg

SEQ ID NO: 541 - RNA, 20 nt, Canis familiaris
augugaacaaacaagguaac

SEQ ID NO: 542 - RNA, 20 nt, Canis familiaris
ggggaaaaugugaacaaaca

SEQ ID NO: 543 - RNA, 20 nt, Canis familiaris
gucuaacucauaugagcuuc

SEQ ID NO: 544 - RNA, 20 nt, Canis familiaris
cauaugaguuagacagcacc

SEQ ID NO: 545 - RNA, 20 nt, Canis familiaris
uguucacauuuuccccauug

SEQ ID NO: 546 - RNA, 20 nt, Canis familiaris
ugucuaacucauaugagcuu

SEQ ID NO: 547 - RNA, 20 nt, Canis familiaris
agaugauagguucugaaaug

SEQ ID NO: 548 - RNA, 20 nt, Canis familiaris
gcaucuguuuugcagaugau

SEQ ID NO: 549 - RNA, 20 nt, Canis familiaris
ucacauuuuccccauugagg

SEQ ID NO: 550 - RNA, 20 nt, Canis familiaris
aaugugaacaaacaagguaa

SEQ ID NO: 551 - RNA, 20 nt, Canis familiaris
uaucaucugcaaaacagaug

SEQ ID NO: 552 - RNA, 20 nt, Canis familiaris
ugaccaucucucucugaauc

SEQ ID NO: 553 - RNA, 20 nt, Canis familiaris
uuaccugauucagagagaga

SEQ ID NO: 554 - RNA, 20 nt, Homo sapiens
guuacaguugugcggccugc

SEQ ID NO: 555 - RNA, 20 nt, Homo sapiens
ccgcuccuucucgguccggc

SEQ ID NO: 556 - RNA, 20 nt, Canis familiaris
augacacagaagaagguaag

SEQ ID NO: 557 - RNA, 20 nt, Canis familiaris
cacuaccacauuuuccuuga

SEQ ID NO: 558 - RNA, 20 nt, Homo sapiens
gcgcugcgcucugugcccgc

SEQ ID NO: 559 - RNA, 20 nt, Homo sapiens
gccugccgggccgcugagcg

SEQ ID NO: 560 - RNA, 20 nt, Canis familiaris
aucauagaaggauuucuaug

SEQ ID NO: 561 - RNA, 20 nt, Homo sapiens
uccucgcucagcggcccggc

SEQ ID NO: 562 - RNA, 20 nt, Canis familiaris
cauuuuccuugaagguaagc

SEQ ID NO: 563 - RNA, 20 nt, Homo sapiens
ggccgccgcccgcuccuucu

SEQ ID NO: 564 - DNA, 20 bp, Homo sapiens
gaccgagaaggagcgggcgg

SEQ ID NO: 565 - RNA, 20 nt, Canis familiaris
ugucauuggcaaugucuucc

SEQ ID NO: 566 - DNA, 20 bp, Homo sapiens
agaaggagcgggcggcggcc

SEQ ID NO: 567 - DNA, 20 bp, Homo sapiens
gagaaggagcgggcggcggc

SEQ ID NO: 568 - RNA, 20 nt, Canis familiaris
cuuaccuucuucugugucau

SEQ ID NO: 569 - RNA, 20 nt, Canis familiaris
uagaaggauuucuaugagga

SEQ ID NO: 570 - RNA, 20 nt, Canis familiaris
gcuuaccuucaaggaaaaug

SEQ ID NO: 571 - RNA, 20 nt, Canis familiaris
ggaagauucuaaagaagaga

SEQ ID NO: 572 - RNA, 21 nt, Homo sapiens
uaagccaagaguguucggcac

SEQ ID NO: 573 - RNA, 21 nt, Homo sapiens
gcagcaagauaccgagaugag

SEQ ID NO: 574 - RNA, 21 nt, Homo sapiens
gguuaagacugaugcagccgg

SEQ ID NO: 575 - RNA, 21 nt, Homo sapiens
ccagucaccaucauuucgguc

SEQ ID NO: 576 - RNA, 21 nt, Homo sapiens
gaguguucggcacauggguaa

SEQ ID NO: 577 - RNA, 20 nt, Canis familiaris
caaggaaaaugugguagugg

SEQ ID NO: 578 - RNA, 20 nt, Canis familiaris
aguauaguucgacaaacagg

SEQ ID NO: 579 - RNA, 20 nt, Canis familiaris
ucuguaaugcagcagucaug

SEQ ID NO: 580 - RNA, 20 nt, Canis familiaris
uuacagaauuuggaugaugc

SEQ ID NO: 581 - RNA, 20 nt, Canis familiaris
gucgaacuauacuuugauug

SEQ ID NO: 582 - RNA, 20 nt, Canis familiaris
aaguuguaugcuacugaucu

SEQ ID NO: 583 - RNA, 20 nt, Canis familiaris
caaaguauaguucgacaaac

SEQ ID NO: 584 - RNA, 20 nt, Canis familiaris
guugucauucaggaugaauu

SEQ ID NO: 585 - RNA, 20 nt, Canis familiaris
augaaaaauacaacuauaua

SEQ ID NO: 586 - RNA, 20 nt, Canis familiaris
gaaguuguaugcuacugauc

SEQ ID NO: 587 - RNA, 20 nt, Canis familiaris
gguugucauucaggaugaau

SEQ ID NO: 588 - RNA, 20 nt, Canis familiaris
uuugauugagguugucauuc

SEQ ID NO: 589 - RNA, 20 nt, Canis familiaris
aguuguauuuuucauuguua

SEQ ID NO: 590 - RNA, 20 nt, Canis familiaris
gacugcugcauuacagaauu

SEQ ID NO: 591 - DNA, 813 bp, Mus musculus
atggccaaagttcctgacttgtttgaagacctaaagaactgttacagtgaaaacgaagactacagttctgccattgaccatctctctctgaatcagaaatccttctatgatgcaagctatggctcacttcatgagacttgcacagatcagtttgtatctctgagaacctctgaaacgtcaaagatgtccaacttcaccttcaaggagagccgggtgacagtatcagcaacgtcaagcaacgggaagattctgaagaagagacggctgagtttcagtgagaccttcactgaagatgacctgcagtccataacccatgatctggaagagaccatccaacccagatcagcaccttacacctaccagagtgatttgagatacaaactgatgaagctcgtcaggcagaagtttgtcatgaatgattccctcaaccaaactatatatcaggatgtggacaaacactatctcagcaccacttggttaaatgacctgcaacaggaagtaaaatttgacatgtatgcctactcgtcgggaggagacgactctaaatatcctgttactctaaaaatctcagattcacaactgttcgtgagcgctcaaggagaagaccagcccgtgttgctgaaggagttgccagaaacaccaaaactcatcacaggtagtgagaccgacctcattttcttctggaaaagtatcaactctaagaactacttcacatcagctgcttatccagagctgtttattgccaccaaagaacaaagtcgggtgcacctggcacggggactgccctctatgacagacttccagatatcataa

SEQ ID NO: 592 - DNA, 816 bp, Homo sapiens
atggccaaagttccagacatgtttgaagacctgaagaactgttacagtgaaaatgaagaagacagttcctccattgatcatctgtctctgaatcagaaatccttctatcatgtaagctatggcccactccatgaaggctgcatggatcaatctgtgtctctgagtatctctgaaacctctaaaacatccaagcttaccttcaaggagagcatggtggtagtagcaaccaacgggaaggttctgaagaagagacggttgagtttaagccaatccatcactgatgatgacctggaggccatcgccaatgactcagaggaagaaatcatcaagcctaggtcagcaccttttagcttcctgagcaatgtgaaatacaactttatgaggatcatcaaatacgaattcatcctgaatgacgccctcaatcaaagtataattcgagccaatgatcagtacctcacggctgctgcattacataatctggatgaagcagtgaaatttgacatgggtgcttataagtcatcaaaggatgatgctaaaattaccgtgattctaagaatctcaaaaactcaattgtatgtgactgcccaagatgaagaccaaccagtgctgctgaaggagatgcctgagatacccaaaaccatcacaggtagtgagaccaacctcctcttcttctgggaaactcacggcactaagaactatttcacatcagttgcccatccaaacttgtttattgccacaaagcaagactactgggtgtgcttggcaggggggccaccctctatcactgactttcagatactggaaaaccaggcgtag

SEQ ID NO: 593 - DNA, 813 bp, Equus caballus
atggcgaaagtccctgacctctttgaagacctgaagaactgttacagtgaaaatgaagactacagttctgaaattgaccatctctctctgactcagaaatccttctatgatgcaagctatgacccacttcctgaggactgcatggatacatttatgtctctgagcacctctgaaacctctaagacatccaagctgaacttcaaggagagcgtggtgctggtggcagccaacgggaagactctgaagaagagacggttgagtttaaatcagttcatcaccaatgatgacctggaagccattgccaatgatccagaagaaggaatcatcaagccccgatcagtacattacaacttccagagcaatacaaaatacaactttatgaggatcgtcaaccaccagtgtactctgaatgatgccctcaatcaaagtgtaattcgagacacatcaggtcaatatcttgcgactgctgcattaaataatctggacgacgcagtgaaatttgacatgggtgcttatacatcagaagaggattctcaacttcctgtgactctaagaatctcaaaaactcgactgtttgtgagtgcccaaaatgaagatgaacccgtactgctaaaggagatgcctgacacacccaaaactatcaaagatgagaccaacctcctcttcttctgggaacgtcacggctctaagaactacttcaaatcggttgcccatccaaagttgtttattgccacaaagcagggaaaactggtgcacatggcaagggggcaaccctctatcactgactttcagatattggacaaccagttttga

SEQ ID NO: 594 - DNA, 813 bp, Felis catus
atggccaaagttcctgacctctttgaagacctgaagaactgttacagtgaaaatgaagaatacagttctgaaattgaccatctcactctgaatcagaaatccttctatgatgcaagctatgacccacttcatgaggactgtacagataaattcatgtctccgagtacttctgaaacctctaagacaccccagcttaccctcaagaagagtgtggtgatggtggcagccaatgggaagattctgaagaagagacggttgagtttaaatcaattcctcactgctgatgacctggaagccattgccaacgaagtagaagaagaaatcatgaagcccagatcagtagcacccaacttctatagcagtgaaaaatacaactatcagaagatcatcaaatcccaattcatcctgaatgacaacctcagtcaaagtgtaattcgaaaagcagggggaaaatacctcgcagccgctgcattacagaatctggatgatgcagtgaaatttgacatgggggcttatacatcaaaagaagattctaaacttcctgtgactctcagaatctcaaaaactcgactgtttgtgagtgcccaaaatgaagatgagcctgtattgctaaaggagatgcctgagacacccaaaaccatcagagatgagaccaaccttctcttcttctgggaacgtcatggcagtaagaactacttcaaatcagttgcccatccaaagttgttcattgccacacaggaagaacaactggtgcacatggcaagaggactaccctctgtcactgactttcagatactggaaacccagtcttga

SEQ ID NO: 595 - DNA, 798 bp, Canis familiaris
atggccaaagttcctgacctctttgaagacctgaagaactgttacagtgaaaatgaagaatacagttctgaaattgaccatctctctctgaatcagaaatccttctatgatatgagctgtgacccacttcatgaggactgcatgtctctgagtacctctgaaatctcaaagacatcccagcttaccttcaaggaaaatgtggtagtggtggcagccaatgggaagattctaaagaagagacggttgagtttaagtcaattcatcaccgatgatgacctggaagacattgccaatgacacagaagaagtaatcatgaagcccagatcagtagcatacaacttccataacaatgaaaaatacaactatataaggatcatcaaatcccaattcatcctgaatgacaacctcaatcaaagtatagttcgacaaacaggaggaaattacctcatgactgctgcattacagaatttggatgatgcagtgaagtttgacatgggagcttacacatcagaagattctaaacttcctgtgactctaagaatatcaaaaactcgactctttgtgagtgcccaaaatgaagatgaacctgtattgctaaaggagatgcctgagacacccaaaactatcagagatgagacaaaccttcttttcttttgggagcgtcatggcagtaagcactacttcaaatcagttgcccagcccaagttgttcattgccacacaggaacgaaaactggtgcacatggcaagagggcaaccctctatcactgactttcggttactggaaacccagccttga

SEQ ID NO: 596 - DNA, 810 bp, Mus musculus
atggcaactgttcctgaactcaactgtgaaatgccaccttttgacagtgatgagaatgacctgttctttgaagttgacggaccccaaaagatgaagggctgcttccaaacctttgacctgggctgtcctgatgagagcatccagcttcaaatctcgcagcagcacatcaacaagagcttcaggcaggcagtatcactcattgtggctgtggagaagctgtggcagctacctgtgtctttcccgtggaccttccaggatgaggacatgagcaccttcttttccttcatctttgaagaagagcccatcctctgtgactcatgggatgatgatgataacctgctggtgtgtgacgttcccattagacaactgcactacaggctccgagatgaacaacaaaaaagcctcgtgctgtcggacccatatgagctgaaagctctccacctcaatggacagaatatcaaccaacaagtgatattctccatgagctttgtacaaggagaaccaagcaacgacaaaatacctgtggccttgggcctcaaaggaaagaatctatacctgtcctgtgtaatgaaagacggcacacccaccctgcagctggagagtgtggatcccaagcaatacccaaagaagaagatggaaaaacggtttgtcttcaacaagatagaagtcaagagcaaagtggagtttgagtctgcagagttccccaactggtacatcagcacctcacaagcagagcacaagcctgtcttcctgggaaacaacagtggtcaggacataattgacttcaccatggaatccgtgtcttcctaa

SEQ ID NO: 597 - DNA, 810 bp, Homo sapiens
atggcagaagtacctgagctcgccagtgaaatgatggcttattacagtggcaatgaggatgacttgttctttgaagctgatggccctaaacagatgaagtgctccttccaggacctggacctctgccctctggatggcggcatccagctacgaatctccgaccaccactacagcaagggcttcaggcaggccgcgtcagttgttgtggccatggacaagctgaggaagatgctggttccctgcccacagaccttccaggagaatgacctgagcaccttctttcccttcatctttgaagaagaacctatcttcttcgacacatgggataacgaggcttatgtgcacgatgcacctgtacgatcactgaactgcacgctccgggactcacagcaaaaaagcttggtgatgtctggtccatatgaactgaaagctctccacctccagggacaggatatggagcaacaagtggtgttctccatgtcctttgtacaaggagaagaaagtaatgacaaaatacctgtggccttgggcctcaaggaaaagaatctgtacctgtcctgcgtgttgaaagatgataagcccactctacagctggagagtgtagatcccaaaaattacccaaagaagaagatggaaaagcgatttgtcttcaacaagatagaaatcaataacaagctggaatttgagtctgcccagttccccaactggtacatcagcacctctcaagcagaaaacatgcccgtcttcctgggagggaccaaaggcggccaggatataactgacttcaccatgcaatttgtgtcttcctaa

SEQ ID NO: 598 - DNA, 984 bp, Canis familiaris
atgtttcctctgcacccaaaggaaggttctttcatgcattcactcattcatttaaagattgtttctttacatgcctgccatgtaccaggtgctaagggaaactcacatatgaaggcagccctgggggagactggcctggcaggaatcatttattttctcctctttacgcaggtttctaaagcagccatggcagcagtacccgaactcaccagtgaaatgatggcttactccagtaacaatgagaatgacctattctttgaagctgatggccctggaaatgtgaagtgctgctgccaagacctgaaccacagttctctggtagatgagggcatccagttgcaagtctcccaccagctctgtaacaagagtctgaggcatttcgtgtcagtcattgtagctttggagaagctgaagaagccctgcccacaggtcctccaggaggatgacctgaagagcatcttttgctacatctttgaagaagaacctatcatctgcaaaacagatgcggataattttatgagtgatgcagccatgcaatcggtggactgcaagttacaggacataagccacaaatacctggtgctgtctaactcatatgagcttcgggctctccacctcaatggggaaaatgtgaacaaacaagtggtgttccacatgagctttgtgcacggggatgaaagtaataacaagatacctgtggtcttgggcatcaaacaaaagaatctgtacctgtcctgtgtgatgaaggatggaaagcccaccctacagctagagaaggtagaccccaaagtctacccaaagaggaagatggaaaagcgatttgtcttcaacaagatagaaatcaagaacacagtggaatttgagtcttctcagtaccctaactggtacatcagcacctctcaagtcgaaggaatgcctgtcttcctaggaaataccagaggtggccaggatataactgacttcaccatggaattctcttcctag

SEQ ID NO: 599 - DNA, 909 bp, Felis catus
atgagattgaaattggcagagagcagatctctcgaggcacagcagcccactccgggattctattctctccagtcagtcttcattactcaggtttctgaagtggccatggcagcagtacctgaactcaccagtgaaatgatggcttactacagtgatgagaatgacctgttctttgaggctgatggccccgaaaagatgaagggcagcctccaaaacctgagccacagttttctgggagatgagggcatccagttgcaaatctcccaccagcccgacaacaagagtcttaggcatgccgtgtcggtcattgtggccatggagaaactgaagaagatatcttttccctgctcacaacccctccaggatgaggacctgaagagcctcttttgctgcatctttgaagaagaacccatcatctgtgacacgtgggatgacggttttgtgtgtgatgcggccatacaatcacaggactacacgttccgagacataagccaaaagagcctggtgctgtctggctcatacgagcttcgggctctccacctcaatggacagaatatgaaccaacaagtggtgttccgcatgagctttgtgcacggggaggaaaatagtaagaagataccagtagtgttgtgcatcaagaaaaataacctgtacctgtcctgtgtgatgaaagatgggaaacccaccctacagctggagatgttagaccccaaagtttacccaaagaagaagatggaaaagagatttgtcttcaacaagacagaaatcaagggcaatgtggaatttgagtcttcccagttccccaactggtacatcagcacctctcaagcagaagaaatgcctgtcttcctaggaaataccaaaggtggtcaggatataactgacttcatcatggaaagcgcttcctaa

SEQ ID NO: 600 - DNA, 807 bp, Equus caballus
atggcagcagtacccgacaccagtgacatgatgacttactgcagcggcaatgagaatgacctgttctttgaggaggatggcccaaaacagatgaagggcagcttccaagacctggacctcagctccatgggcgatgggggcatccagcttcaattctcccaccaactttacaacaagactttcaagcatgtcgtgtcaatcattgtggctatggagaagctgaagaagatacccgttccctgctcacaggccttccaggatgatgacttgaggagcctcttttctgtcatctttgaagaagaacccatcatctgtgacaactgggatgatgattatgtgtgtgatgcagctgtgcattcagtgaactgcagactccgggacatataccataaatccctggtgctgtccggtgcatgtgagctgcaggctgtccacctcaatggagagaatacaaaccaacaagtggtgttctgcatgagctttgtgcaaggagaagaagagactgacaagatacctgtggccttgggcctcaaggaaaagaacctgtacctgtcttgtgggatgaaagatgggaagcccaccctacagctggagacagtagaccccaatacttacccaaagaggaaaatggaaaagcgatttgtcttcaacaagatggaaatcaagggcaacgtggaatttgagtctgcaatgtaccccaactggtacatcagcacctctcaagcagaaaaaaagcctgtcttcctaggaaataccagaggcggccgggacataactgacttcatcatggaaatcacctctgcctaa

SEQ ID NO: 601 - DNA, 53 bp, Artificial sequence
  Sequence is synthesized
tacctgattcagagacagatgatcaaatggaggaactgtcttcttcattttca

SEQ ID NO: 602 - DNA, 53 bp, Artificial sequence
  Sequence is synthesized
atggagtgggccatagcttacatgattagaaggatttctgtgaggaaggaaaa

SEQ ID NO: 603 - DNA, 50 bp, Artificial sequence
  Sequence is synthesized
catttcagaacctatcttcttcgacatgggataacgaggcttatgtgcac

SEQ ID NO: 604 - DNA, 51 bp, Artificial sequence
  Sequence is synthesized
tcccggagcgtgcagttcagtgatctacaggtgcatcgtgcacataagcct

SEQ ID NO: 605 - DNA, 53 bp, Artificial sequence
  Sequence is synthesized
ctttgaagctgatggccctaaacagaatgaaggtaagactatgggtttaactc

SEQ ID NO: 606 - DNA, 53 bp, Artificial sequence
  Sequence is synthesized
tgctgtagtggtggtcggagattcgttagctggatgccgccatccagagggca

SEQ ID NO: 607 - DNA, 53 bp, Artificial sequence
  Sequence is synthesized
catttcagaacctatcttcttcgacaacatgggataacgaggcttatgtgcac

SEQ ID NO: 608 - DNA, 53 bp, Artificial sequence
  Sequence is synthesized
acctatcttcttcgacacatgggataaacgaggcttatgtgcacgatgcacct

SEQ ID NO: 609 - DNA, 53 bp, Artificial sequence
  Sequence is synthesized
tcccggagcgtgcagttcagtgatcgttacaggtgcatcgtgcacataagcct

SEQ ID NO: 610 - DNA, 53 bp, Artificial sequence
  Sequence is synthesized
ttctgaaattgaccatctctctctgaaatcaggtaagtaaatgactgcaattc

SEQ ID NO: 611 - DNA, 53 bp, Artificial sequence
  Sequence is synthesized
aatctcaaagacatcccagcttacctttcaaggaaaatgtggtagtggtggca

SEQ ID NO: 612 - DNA, 53 bp, Artificial sequence
  Sequence is synthesized
ctcaatcaaagtatagttcgacaaaccaggaggaaattacctcatgactgctg

SEQ ID NO: 613 - DNA, 53 bp, Artificial sequence
  Sequence is synthesized
catccaaattctgtaatgcagcagtccatgaggtaatttcctcctgtttgtcg

SEQ ID NO: 614 - DNA, 20 bp, Homo sapiens
cagagacagatgatcaatgg

SEQ ID NO: 615 - DNA, 20 bp, Homo sapiens
tgatggccctaaacagatga

SEQ ID NO: 616 - DNA, 53 bp, Artificial sequence
  Sequence is synthesized
ctttgaagctgatggccctggaaatgttgaaggtgagaccatgggcttagctc

SEQ ID NO: 617 - DNA, 53 bp, Artificial sequence
  Sequence is synthesized
atgcctcagactcttgttacagagcttggtgggagacttgcaactggatgccc

SEQ ID NO: 618 - DNA, 50 bp, Artificial sequence
  Sequence is synthesized
ctttgaagctgatggccctggaaatgaaggtgagaccatgggcttagctc

SEQ ID NO: 619 - DNA, 20 bp, Homo sapiens
ggtggtcggagattcgtagc

SEQ ID NO: 620 - DNA, 20 bp, Artificial sequence
  Sequence is synthesized
cattgggaggatgcttagga

SEQ ID NO: 621 - DNA, 20 bp, Artificial sequence
  Sequence is synthesized
ggctgctttctctccaacag

SEQ ID NO: 622 - DNA, 20 bp, Artificial sequence
  Sequence is synthesized
aggaagcctgtgtctggttg

SEQ ID NO: 623 - DNA, 20 bp, Artificial sequence
  Sequence is synthesized
tggcatcgtgagataagctg

SEQ ID NO: 624 - DNA, 20 bp, Artificial sequence
  Sequence is synthesized
tggtttcaggaaaacccaag

SEQ ID NO: 625 - DNA, 20 bp, Artificial sequence
  Sequence is synthesized
gcagtatggccaagaaagga

SEQ ID NO: 626 - DNA, 20 bp, Artificial sequence
  Sequence is synthesized
ctgggcaagaacattggatt

SEQ ID NO: 627 - DNA, 20 bp, Canis familiaris
tgaccatctctctctgaatc

SEQ ID NO: 628 - DNA, 20 bp, Canis familiaris
agtatagttcgacaaacagg

SEQ ID NO: 629 - DNA, 20 bp, Canis familiaris
tctgtaatgcagcagtcatg

SEQ ID NO: 630 - DNA, 20 bp, Canis familiaris
tgatggccctggaaatgtga

SEQ ID NO: 631 - DNA, 20 bp, Canis familiaris
actcttgttacagagctggt

SEQ ID NO: 632 - DNA, 20 bp, Homo sapiens
gacctctgccctctggatgg

SEQ ID NO: 633 - DNA, 20 bp, Homo sapiens
ctctccgcagtgctccttcc

SEQ ID NO: 634 - DNA, 20 bp, Homo sapiens
cattctcctggaaggtctgt

SEQ ID NO: 635 - DNA, 20 bp, Homo sapiens
agctggatgccgccatccag

SEQ ID NO: 636 - DNA, 20 bp, Homo sapiens
accactacagcaagggcttc

SEQ ID NO: 637 - DNA, 20 bp, Homo sapiens
catggccacaacaactgacg

SEQ ID NO: 638 - DNA, 20 bp, Homo sapiens
attcagagacagatgatcaa

SEQ ID NO: 639 - DNA, 20 bp, Homo sapiens
ctacagcaagggcttcaggc

SEQ ID NO: 640 - DNA, 20 bp, Artificial sequence
  Sequence is synthesized
acttttgtttcagagctggt

SEQ ID NO: 641 - DNA, 20 bp, Artificial sequence
  Sequence is synthesized
cctcatgctacagagctggt

SEQ ID NO: 642 - DNA, 20 bp, Artificial sequence
  Sequence is synthesized
gtgcttgttacagagctggt

SEQ ID NO: 643 - DNA, 20 bp, Equus caballus
ttacctgagtcagagagaga

SEQ ID NO: 644 - DNA, 20 bp, Canis familiaris
agacctgaaccacagttctc

SEQ ID NO: 645 - DNA, 20 bp, Felis catus
gtagtaagccatcatttcac

SEQ ID NO: 646 - DNA, 20 bp, Felis catus
gagtcttaggcatgccgtgt

SEQ ID NO: 647 - DNA, 20 bp, Felis catus
aaacctgagccacagttttc

SEQ ID NO: 648 - DNA, 20 bp, Felis catus
atcatttcactggtgagttc

SEQ ID NO: 649 - DNA, 20 bp, Canis familiaris
cattttccttgaaggtaagc

SEQ ID NO: 650 - DNA, 20 bp, Felis catus
actcttgttgtcgggctggt

SEQ ID NO: 651 - DNA, 20 bp, Felis catus
gactcttgttgtcgggctgg

SEQ ID NO: 652 - DNA, 20 bp, Felis catus
cctcatctcccagaaaactg

SEQ ID NO: 653 - DNA, 20 bp, Felis catus
tgagaatgacctgttctttg

SEQ ID NO: 654 - DNA, 20 bp, Felis catus
taagactcttgttgtcgggc

SEQ ID NO: 655 - DNA, 20 bp, Canis familiaris
cactaccacattttccttga

SEQ ID NO: 656 - DNA, 20 bp, Felis catus
ggtaagctggggtgtcttag

SEQ ID NO: 657 - DNA, 20 bp, Felis catus
attcctcactgctgatgacc

SEQ ID NO: 658 - DNA, 20 bp, Felis catus
tggtgatggtggcagccaat

SEQ ID NO: 659 - DNA, 20 bp, Felis catus
cttccaggtcatcagcagtg

SEQ ID NO: 660 - DNA, 20 bp, Equus caballus
tgaaagtcttgttgtaaagt

SEQ ID NO: 661 - DNA, 20 bp, Equus caballus
gacctcagctccatgggcga

SEQ ID NO: 662 - DNA, 20 bp, Equus caballus
ctggatgcccccatcgccca

SEQ ID NO: 663 - DNA, 20 bp, Equus caballus
ccccatcgcccatggagctg

SEQ ID NO: 664 - DNA, 20 bp, Equus caballus
aagtcttgttgtaaagttgg

SEQ ID NO: 665 - DNA, 20 bp, Felis catus
aacctgagccacagttttct

SEQ ID NO: 666 - protein, 1434 aa, Artificial sequence
  Sequence is synthesized
MDYKDHDGDYKDHDIDYKDDDDKMAPKKKRKVGIHGVPAADKKYSIGLDIGTNSVGWAVITDEYKVPSKKFKVLGNTDRHSIKKNLIGALLFDSGETAEATRLKRTARRRYTRRKNRICYLQEIFSNEMAKVDDSFFHRLEESFLVEEDKKHERHPIFGNIVDEVAYHEKYPTIYHLRKKLVDSTDKADLRLIYLALAHMIKFRGHFLIEGDLNPDNSDVDKLFIQLVQTYNQLFEENPINASGVDAKAILSARLSKSRRLENLIAQLPGEKKNGLFGNLIALSLGLTPNFKSNFDLAEDAKLQLSKDTYDDDLDNLLAQIGDQYADLFLAAKNLSDAILLSDILRVNTEITKAPLSASMIKRYDEHHQDLTLLKALVRQQLPEKYKEIFFDQSKNGYAGYIDGGASQEEFYKFIKPILEKMDGTEELLVKLNREDLLRKQRTFDNGSIPHQIHLGELHAILRRQEDFYPFLKDNREKIEKILTFRIPYYVGPLARGNSRFAWMTRKSEETITPWNFEEVVDKGASAQSFIERMTNFDKNLPNEKVLPKHSLLYEYFTVYNELTKVKYVTEGMRKPAFLSGEQKKAIVDLLFKTNRKVTVKQLKEDYFKKIECFDSVEISGVEDRFNASLGTYHDLLKIIKDKDFLDNEENEDILEDIVLTLTLFEDREMIEERLKTYAHLFDDKVMKQLKRRRYTGWGRLSRKLINGIRDKQSGKTILDFLKSDGFANRNFMQLIHDDSLTFKEDIQKAQVSGQGDSLHEHIANLAGSPAIKKGILQTVKVVDELVKVMGRHKPENIVIEMARENQTTQKGQKNSRERMKRIEEGIKELGSQILKEHPVENTQLQNEKLYLYYLQNGRDMYVDQELDINRLSDYDVDHIVPQSFLADDSIDNKVLTRSDKNRGKSDNVPSEEVVKKMKNYWRQLLNAKLITQRKFDNLTKAERGGLSELDKAGFIKRQLVETRQITKHVAQILDSRMNTKYDENDKLIREVKVITLKSKLVSDFRKDFQFYKVREINNYHHAHDAYLNAVVGTALIKKYPALESEFVYGDYKVYDVRKMIAKSEQEIGKATAKYFFYSNIMNFFKTEITLANGEIRKAPLIETNGETGEIVWDKGRDFATVRKVLSMPQVNIVKKTEVQTGGFSKESILPKRNSDKLIARKKDWDPKKYGGFDSPTVAYSVLVVAKVEKGKSKKLKSVKELLGITIMERSSFEKNPIDFLEAKGYKEVKKDLIIKLPKYSLFELENGRKRMLASAGELQKGNELALPSKYVNFLYLASHYEKLKGSPEDNEQKQLFVEQHKHYLDEIIEQISEFSKRVILADANLDKVLSAYNKHRDKPIREQAENIIHLFTLTNLGAPAAFKYFDTTIDRKRYTSTKEVLDATLIHQSITGLYETRIDLSQLGGDKRPAATKKAGQAKKKKAAALEHHHHHH

SEQ ID NO: 667 - DNA, 20 bp, Homo sapiens
gaaggagcgggcggcggccg

SEQ ID NO: 668 - RNA, 21 nt, Homo sapiens
gaacacucuuggcuuaccucc

SEQ ID NO: 669 - RNA, 21 nt, Homo sapiens
ucuugcuguauaaccaagggc

SEQ ID NO: 670 - RNA, 21 nt, Homo sapiens
ugaaugcagcaagauaccgag

SEQ ID NO: 671 - RNA, 21 nt, Homo sapiens
gggcagccacaugcacgccua

SEQ ID NO: 672 - RNA, 21 nt, Homo sapiens
ugcagauacacugggacaaug

SEQ ID NO: 673 - RNA, 21 nt, Homo sapiens
gugaaugcccucaacuucuca

SEQ ID NO: 674 - RNA, 21 nt, Homo sapiens
agucuuaaccgaaccagcucu

SEQ ID NO: 675 - RNA, 21 nt, Homo sapiens
ucccggcugcaucagucuuaa

SEQ ID NO: 676 - RNA, 21 nt, Homo sapiens
ugugauccucggagguaagcc

SEQ ID NO: 677 - RNA, 21 nt, Homo sapiens
ugaacugaaugcagcaagaua

SEQ ID NO: 678 - RNA, 21 nt, Homo sapiens
ugcugcugacguugcauguuu

SEQ ID NO: 679 - RNA, 21 nt, Homo sapiens
aagaagagguuaugaguauac

SEQ ID NO: 680 - RNA, 21 nt, Homo sapiens
ucacuaccuccaccagauguu

SEQ ID NO: 681 - RNA, 20 nt, Homo sapiens
uucgugaagauggugcacaa

SEQ ID NO: 682 - RNA, 20 nt, Homo sapiens
ggguacgccguauuccaggg

SEQ ID NO: 683 - RNA, 20 nt, Homo sapiens
aaagcauaacauuaccaaug

SEQ ID NO: 684 - RNA, 20 nt, Homo sapiens
ggugacaucaucauugacgg

SEQ ID NO: 685 - DNA, 20 bp, Homo sapiens
caggagggaacaaagaagcg

SEQ ID NO: 686 - RNA, 20 nt, Homo sapiens
auuucaucgagaaauuggug

SEQ ID NO: 687 - RNA, 20 nt, Homo sapiens
gaacuugcccagucacagca

SEQ ID NO: 688 - RNA, 20 nt, Homo sapiens
ugcacaacgggauagaguau

SEQ ID NO: 689 - RNA, 20 nt, Homo sapiens
cucaaguuccaagacaccga

SEQ ID NO: 690 - RNA, 20 nt, Homo sapiens
gacggguacgccguauucca

SEQ ID NO: 691 - RNA, 20 nt, Homo sapiens
ggcccaucgcucaugccagg

SEQ ID NO: 692 - RNA, 20 nt, Homo sapiens
gcccaucgcucaugccagga

SEQ ID NO: 693 - RNA, 20 nt, Homo sapiens
cgccgcuuaccacaaagccg

SEQ ID NO: 694 - RNA, 20 nt, Homo sapiens
gccaaagaucagggacagcg

SEQ ID NO: 695 - RNA, 20 nt, Homo sapiens
caugaaugaccacggcuuug

SEQ ID NO: 696 - RNA, 20 nt, Homo sapiens
accaggaggaugauccgccg

SEQ ID NO: 697 - RNA, 20 nt, Homo sapiens
ccaucaaacuggaacuucug

SEQ ID NO: 698 - RNA, 20 nt, Homo sapiens
ucggugcuuaucaucucuga

SEQ ID NO: 699 - RNA, 20 nt, Homo sapiens
aacauuaccaaugaggguga

SEQ ID NO: 700 - RNA, 20 nt, Homo sapiens
aagcauaacauuaccaauga

SEQ ID NO: 701 - RNA, 20 nt, Homo sapiens
caaagaucagggacagcgcg

SEQ ID NO: 702 - RNA, 20 nt, Homo sapiens
guauuccagggcggagaugg

SEQ ID NO: 703 - RNA, 20 nt, Homo sapiens
ccaagcugaagaagccccgg

SEQ ID NO: 704 - RNA, 20 nt, Homo sapiens
uaggagaagcugucuuugcu

SEQ ID NO: 705 - RNA, 20 nt, Homo sapiens
aggacgagauggcccaggug

SEQ ID NO: 706 - RNA, 20 nt, Homo sapiens
ccaugguaccacuaaccacg

SEQ ID NO: 707 - RNA, 20 nt, Homo sapiens
ccaguguaagcaauccucag

SEQ ID NO: 708 - RNA, 20 nt, Homo sapiens
acagacuuucucuagaggcg

SEQ ID NO: 709 - RNA, 20 nt, Homo sapiens
uggggcagccagaaucauug

SEQ ID NO: 710 - RNA, 20 nt, Homo sapiens
cuguggcacagaugaccacg

SEQ ID NO: 711 - RNA, 20 nt, Homo sapiens
cacacugaggaauagcgagu

SEQ ID NO: 712 - RNA, 20 nt, Homo sapiens
cacaggaaguggggucacca

SEQ ID NO: 713 - RNA, 20 nt, Homo sapiens
caccuucucacaguacacag

SEQ ID NO: 714 - RNA, 20 nt, Homo sapiens
cuucucacaguacacagugg

SEQ ID NO: 715 - RNA, 20 nt, Homo sapiens
cuacugcuugaaaaacgagu

SEQ ID NO: 716 - RNA, 20 nt, Homo sapiens
ccacucgcuauuccucagug

SEQ ID NO: 717 - RNA, 20 nt, Homo sapiens
gccuaaaaucacaggaagug

SEQ ID NO: 718 - RNA, 20 nt, Homo sapiens
uacagcccauaauagcagau

SEQ ID NO: 719 - RNA, 20 nt, Homo sapiens
ccacacugaggaauagcgag

SEQ ID NO: 720 - RNA, 20 nt, Homo sapiens
ccccugaggauugcuuacac

SEQ ID NO: 721 - RNA, 20 nt, Homo sapiens
ccacgugguuagugguacca

SEQ ID NO: 722 - RNA, 20 nt, Homo sapiens
caccacuguguacugugaga

SEQ ID NO: 723 - RNA, 20 nt, Homo sapiens
uaugggcuguaaagcagcug

SEQ ID NO: 724 - RNA, 20 nt, Homo sapiens
augagacagacuuucucuag

SEQ ID NO: 725 - RNA, 20 nt, Homo sapiens
ccagcagguucaccugcagg

SEQ ID NO: 726 - RNA, 20 nt, Homo sapiens
gucugcagucaauguugcca

SEQ ID NO: 727 - RNA, 20 nt, Homo sapiens
gugagaaggugcugaugcca

SEQ ID NO: 728 - RNA, 20 nt, Homo sapiens
cgaacuucaugggccuuagg

SEQ ID NO: 729 - RNA, 20 nt, Homo sapiens
uccaacacucuccacgaugc

SEQ ID NO: 730 - RNA, 20 nt, Homo sapiens
uugaggguugaugcauucag

SEQ ID NO: 731 - RNA, 20 nt, Homo sapiens
uggagcagccagaaucauug

SEQ ID NO: 732 - RNA, 20 nt, Homo sapiens
ccagguugccacuaaccacg

SEQ ID NO: 733 - RNA, 20 nt, Homo sapiens
caccuucucccaguacacgg

SEQ ID NO: 734 - RNA, 20 nt, Homo sapiens
ucgagaauccacagccaaug

SEQ ID NO: 735 - RNA, 20 nt, Homo sapiens
cugucacacagaugaccacg

SEQ ID NO: 736 - RNA, 20 nt, Homo sapiens
uacagcccauaacagcagau

SEQ ID NO: 737 - RNA, 20 nt, Homo sapiens
gucugcaguuaacguugcca

SEQ ID NO: 738 - RNA, 20 nt, Homo sapiens
cgaacuucauaagccuuagg

SEQ ID NO: 739 - RNA, 20 nt, Homo sapiens
cagcaccuucucccaguaca

SEQ ID NO: 740 - RNA, 20 nt, Homo sapiens
caccaccguguacugggaga

SEQ ID NO: 741 - RNA, 20 nt, Homo sapiens
ccacgugguuaguggcaacc

SEQ ID NO: 742 - RNA, 20 nt, Homo sapiens
ccgcucuuuacuccucagug

SEQ ID NO: 743 - RNA, 20 nt, Homo sapiens
ccaggagguucaccugcagg

SEQ ID NO: 744 - RNA, 20 nt, Homo sapiens
cuacugcuugaaaaaugagu

SEQ ID NO: 745 - RNA, 20 nt, Homo sapiens
ccagucuaggcaauccucgg

SEQ ID NO: 746 - RNA, 20 nt, Homo sapiens
ccacacugaggaguaaagag

SEQ ID NO: 747 - RNA, 20 nt, Homo sapiens
aaugaggcagacuuucucca

SEQ ID NO: 748 - RNA, 20 nt, Homo sapiens
augaggcagacuuucuccag

SEQ ID NO: 749 - RNA, 20 nt, Homo sapiens
cauggccuaaaaucacagga

SEQ ID NO: 750 - RNA, 20 nt, Homo sapiens
gccuaaaaucacaggaaggg

SEQ ID NO: 751 - RNA, 20 nt, Homo sapiens
cccagucuaggcaauccucg

SEQ ID NO: 752 - RNA, 20 nt, Homo sapiens
ggugccaaggaaguggugaa

SEQ ID NO: 753 - RNA, 20 nt, Homo sapiens
uccaacacucuccacgaugc

SEQ ID NO: 754 - RNA, 20 nt, Homo sapiens
acacagcacagguagagccu

SEQ ID NO: 755 - RNA, 20 nt, Homo sapiens
uugaggguugaugcauucag

SEQ ID NO: 756 - RNA, 20 nt, Homo sapiens
acacagcacagguagacccu

SEQ ID NO: 757 - RNA, 20 nt, Homo sapiens
ugaaaacauaggucacccca

SEQ ID NO: 758 - RNA, 20 nt, Homo sapiens
uacagcccauaacaacagau

SEQ ID NO: 759 - RNA, 20 nt, Homo sapiens
caccuucucccaguacacag

SEQ ID NO: 760 - RNA, 20 nt, Homo sapiens
cuucucccaguacacagugg

SEQ ID NO: 761 - RNA, 20 nt, Homo sapiens
ugcugacgccgacgaagugg

SEQ ID NO: 762 - RNA, 20 nt, Homo sapiens
cauugcuguggacaucaaca

SEQ ID NO: 763 - RNA, 20 nt, Homo sapiens
aacacagcacagguagaccc

SEQ ID NO: 764 - RNA, 20 nt, Homo sapiens
cacagcacagguagacccug

SEQ ID NO: 765 - RNA, 20 nt, Homo sapiens
aagcccauccaccacuucgu

SEQ ID NO: 766 - RNA, 20 nt, Homo sapiens
aggugcugacgccgacgaag

SEQ ID NO: 767 - RNA, 20 nt, Homo sapiens
gcaugugguuaguggcaacc

SEQ ID NO: 768 - RNA, 20 nt, Homo sapiens
agcagccagaaucauugcug

SEQ ID NO: 769 - RNA, 20 nt, Homo sapiens
ucgaaaauccacagccaaug

SEQ ID NO: 770 - RNA, 20 nt, Homo sapiens
caccacuguguacugggaga

SEQ ID NO: 771 - RNA, 20 nt, Homo sapiens
ccgcucuuuacuccucagug

SEQ ID NO: 772 - RNA, 20 nt, Homo sapiens
cugucguucagaugagcaug

SEQ ID NO: 773 - RNA, 20 nt, Homo sapiens
gucugcagucaaaguugcca

SEQ ID NO: 774 - RNA, 20 nt, Homo sapiens
cugaaaacauaggucacccc

SEQ ID NO: 775 - RNA, 20 nt, Homo sapiens
ccagucuaggcaauccucgg

SEQ ID NO: 776 - RNA, 20 nt, Homo sapiens
gccggcaucguggaaagugu

SEQ ID NO: 777 - RNA, 20 nt, Homo sapiens
acgccgacgaagugguggau

SEQ ID NO: 778 - RNA, 20 nt, Homo sapiens
ccacacugaggaguaaagag

SEQ ID NO: 779 - RNA, 20 nt, Homo sapiens
aaugaggcagacuuucucca

SEQ ID NO: 780 - RNA, 20 nt, Homo sapiens
gguagagguugcaccuccua

SEQ ID NO: 781 - RNA, 20 nt, Homo sapiens
aaauuuagaaucgauaacag

SEQ ID NO: 782 - RNA, 20 nt, Homo sapiens
agacagcacaagucgaacca

SEQ ID NO: 783 - RNA, 20 nt, Homo sapiens
gacagcacaagucgaaccag

SEQ ID NO: 784 - RNA, 20 nt, Homo sapiens
guccacucacaaauuugugu

SEQ ID NO: 785 - RNA, 20 nt, Homo sapiens
uacauucucucaguacacug

SEQ ID NO: 786 - RNA, 20 nt, Homo sapiens
uucccacacaaauuugugag

SEQ ID NO: 787 - RNA, 20 nt, Homo sapiens
aguguacugagagaauguac

SEQ ID NO: 788 - RNA, 20 nt, Homo sapiens
ucaaccucuucaaugcaaag

SEQ ID NO: 789 - RNA, 20 nt, Homo sapiens
aguccacucacaaauuugug

SEQ ID NO: 790 - RNA, 20 nt, Homo sapiens
ggcugcaaucaacaaugcca

SEQ ID NO: 791 - RNA, 20 nt, Homo sapiens
aagacagcacaagucgaacc

SEQ ID NO: 792 - RNA, 20 nt, Homo sapiens
gguugaaguagcucccccca

SEQ ID NO: 793 - RNA, 20 nt, Homo sapiens
uaaaauaccugguuugacgu

SEQ ID NO: 794 - RNA, 20 nt, Homo sapiens
ccucauggccaacgaucacu

SEQ ID NO: 795 - RNA, 20 nt, Homo sapiens
ggcaucaguauggcacagag

SEQ ID NO: 796 - RNA, 20 nt, Homo sapiens
cccagugaucguuggccaug

SEQ ID NO: 797 - RNA, 20 nt, Homo sapiens
uuugugaaggcuaaagcccu

SEQ ID NO: 798 - RNA, 20 nt, Homo sapiens
cagguauuguggaaaguauu

SEQ ID NO: 799 - RNA, 20 nt, Homo sapiens
auuaguuguugaucacuagc

SEQ ID NO: 800 - RNA, 20 nt, Homo sapiens
gguuugacguuggucacucc

SEQ ID NO: 801 - RNA, 20 nt, Homo sapiens
uaauggaagacaaaaccagc

SEQ ID NO: 802 - RNA, 20 nt, Homo sapiens
ggagugaccaacgucaaacc

SEQ ID NO: 803 - RNA, 20 nt, Homo sapiens
gcgaacuucaugagccuugg

SEQ ID NO: 804 - RNA, 20 nt, Homo sapiens
caacagugagaaguuuguga

SEQ ID NO: 805 - RNA, 20 nt, Homo sapiens
uuagagagaguuugucugcu

SEQ ID NO: 806 - RNA, 20 nt, Homo sapiens
ucaggguauaggcaucggug

SEQ ID NO: 807 - RNA, 20 nt, Homo sapiens
ugcuucccggaucauuggug

SEQ ID NO: 808 - RNA, 20 nt, Homo sapiens
cugauagaucauugccacug

SEQ ID NO: 809 - RNA, 20 nt, Homo sapiens
accgaugccuauacccugag

SEQ ID NO: 810 - RNA, 20 nt, Homo sapiens
gcuggaauuguggaaagugu

SEQ ID NO: 811 - RNA, 20 nt, Homo sapiens
uggguuuacuaaaauccuga

SEQ ID NO: 812 - RNA, 20 nt, Homo sapiens
cugaguggagcugauccuga

SEQ ID NO: 813 - RNA, 20 nt, Homo sapiens
aacagagccaggcuccaacu

SEQ ID NO: 814 - RNA, 20 nt, Homo sapiens
ccugaguggagcugauccug

SEQ ID NO: 815 - RNA, 20 nt, Homo sapiens
agugggaugacagugucacc

SEQ ID NO: 816 - RNA, 20 nt, Homo sapiens
ugugccgucuuuggucuggg

SEQ ID NO: 817 - RNA, 20 nt, Homo sapiens
auuguggaaaguguugguga

SEQ ID NO: 818 - RNA, 20 nt, Homo sapiens
uacuaagcugaaggcgggua

SEQ ID NO: 819 - RNA, 20 nt, Homo sapiens
ugcugcugugaacacugcca

SEQ ID NO: 820 - RNA, 20 nt, Homo sapiens
gggaguuacuaagcugaagg

SEQ ID NO: 821 - RNA, 20 nt, Homo sapiens
gucggauuggcaguuaucau

SEQ ID NO: 822 - RNA, 20 nt, Homo sapiens
ggcucaugaaguucgaauca

SEQ ID NO: 823 - RNA, 20 nt, Homo sapiens
caauaaagauaaauuugcaa

SEQ ID NO: 824 - RNA, 20 nt, Homo sapiens
uggucugggaggagucggau

SEQ ID NO: 825 - RNA, 20 nt, Homo sapiens
aguuaucaugggcuguaaag

SEQ ID NO: 826 - RNA, 20 nt, Homo sapiens
aucgguguggcaaaccgcag

SEQ ID NO: 827 - RNA, 20 nt, Homo sapiens
aucaugggcuguaaaguggc

SEQ ID NO: 828 - RNA, 20 nt, Homo sapiens
uggaaagccucucuccauag

SEQ ID NO: 829 - RNA, 20 nt, Homo sapiens
agaaggcagacuuuauccaa

SEQ ID NO: 830 - RNA, 20 nt, Homo sapiens
cuaaccuuaucuucuggcaa

SEQ ID NO: 831 - RNA, 20 nt, Homo sapiens
uaagcacagugaaaccaggu

SEQ ID NO: 832 - RNA, 20 nt, Homo sapiens
ugcugcaaucaauacugcca

SEQ ID NO: 833 - RNA, 20 nt, Homo sapiens
aaaguaugccuaauuagcug

SEQ ID NO: 834 - RNA, 20 nt, Homo sapiens
uaccucuugccugaauucug

SEQ ID NO: 835 - RNA, 20 nt, Homo sapiens
gagguacauucuccacacug

SEQ ID NO: 836 - RNA, 20 nt, Homo sapiens
aaaacccaacugaugucuga

SEQ ID NO: 837 - RNA, 20 nt, Homo sapiens
gauugcagcaccaaacccag

SEQ ID NO: 838 - RNA, 20 nt, Homo sapiens
ccuucauggcccaagauggu

SEQ ID NO: 839 - RNA, 20 nt, Homo sapiens
ugguacagagaugaaagugu

SEQ ID NO: 840 - RNA, 20 nt, Homo sapiens
gcuggaaucguugagaguau

SEQ ID NO: 841 - RNA, 20 nt, Homo sapiens
gguaccaucagacaucaguu

SEQ ID NO: 842 - RNA, 20 nt, Homo sapiens
ccaagauggugggauacaag

SEQ ID NO: 843 - RNA, 20 nt, Homo sapiens
caucucuguaccacacaguc

SEQ ID NO: 844 - RNA, 20 nt, Homo sapiens
guacagagaugaaaguguug

SEQ ID NO: 845 - RNA, 20 nt, Homo sapiens
cucuguaccacacaguccgg

SEQ ID NO: 846 - RNA, 20 nt, Homo sapiens
aggagcgacugcaucaaucu

SEQ ID NO: 847 - RNA, 20 nt, Homo sapiens
ggaaaaucaauauaucacuu

SEQ ID NO: 848 - RNA, 20 nt, Homo sapiens
ugguaccaucagacaucagu

SEQ ID NO: 849 - RNA, 20 nt, Homo sapiens
agcagccaggaucauuggag

SEQ ID NO: 850 - RNA, 20 nt, Homo sapiens
gguagaaguggccccaccaa

SEQ ID NO: 851 - RNA, 20 nt, Homo sapiens
uccauacagguuguggccac

SEQ ID NO: 852 - RNA, 20 nt, Homo sapiens
ccaccaucuugggccaugaa

SEQ ID NO: 853 - RNA, 20 nt, Homo sapiens
guuguggccaccggacugug

SEQ ID NO: 854 - RNA, 20 nt, Homo sapiens
uacugagugccucaacccuc

SEQ ID NO: 855 - RNA, 20 nt, Homo sapiens
ucuaccucuucaauagaaaa

SEQ ID NO: 856 - RNA, 20 nt, Homo sapiens
uacauuuaccgaguacacag

SEQ ID NO: 857 - RNA, 20 nt, Homo sapiens
ccuacucgcuccuaaugcaa

SEQ ID NO: 858 - RNA, 20 nt, Homo sapiens
cuugggacugauacacucag

SEQ ID NO: 859 - DNA, 20 bp, Homo sapiens
caggccaaagacgacgcaag

SEQ ID NO: 860 - RNA, 20 nt, Homo sapiens
aagacgacgcaaguggaacc

SEQ ID NO: 861 - RNA, 20 nt, Homo sapiens
ccuuugcauuaggagcgagu

SEQ ID NO: 862 - RNA, 20 nt, Homo sapiens
gcauugcauucucuacauug

SEQ ID NO: 863 - RNA, 20 nt, Homo sapiens
cacugaguguaucaguccca

SEQ ID NO: 864 - RNA, 20 nt, Homo sapiens
uguguacucgguaaauguac

SEQ ID NO: 865 - RNA, 20 nt, Homo sapiens
guggaaccagguuugaccug

SEQ ID NO: 866 - RNA, 20 nt, Homo sapiens
uccucuccacaggucaaacc

SEQ ID NO: 867 - RNA, 20 nt, Homo sapiens
acugggauuguagagagcau

SEQ ID NO: 868 - RNA, 20 nt, Homo sapiens
auuuaccgaguacacagugg

SEQ ID NO: 869 - RNA, 20 nt, Homo sapiens
aacagcagcgccauauccag

SEQ ID NO: 870 - RNA, 20 nt, Homo sapiens
caccaccagauuuacaugca

SEQ ID NO: 871 - RNA, 20 nt, Homo sapiens
ccaugugauaaaaggaacaa

SEQ ID NO: 872 - RNA, 20 nt, Homo sapiens
gaagcaacccuucuccauug

SEQ ID NO: 873 - RNA, 20 nt, Homo sapiens
ggagugacuacagugaaacc

SEQ ID NO: 874 - RNA, 20 nt, Homo sapiens
guuggccugucagucaucau

SEQ ID NO: 875 - RNA, 20 nt, Homo sapiens
agacaaauuugagaaggcca

SEQ ID NO: 876 - RNA, 20 nt, Homo sapiens
uacagcccaugaugacugac

SEQ ID NO: 877 - RNA, 20 nt, Homo sapiens
cucaguggcaccuacagcca

SEQ ID NO: 878 - RNA, 20 nt, Homo sapiens
cagauggcaaccuuugcauu

SEQ ID NO: 879 - RNA, 20 nt, Homo sapiens
aaagucuguuuaauuggcug

SEQ ID NO: 880 - RNA, 20 nt, Homo sapiens
gcuggugcaucuaggaucau

SEQ ID NO: 881 - RNA, 20 nt, Homo sapiens
ugaagaagucuccgucaaug

SEQ ID NO: 882 - RNA, 20 nt, Homo sapiens
cccugugugaugcguccaug

SEQ ID NO: 883 - RNA, 20 nt, Homo sapiens
acacacgccaugaaccugug

SEQ ID NO: 884 - RNA, 20 nt, Homo sapiens
cgcauggacgcaucacacag

SEQ ID NO: 885 - RNA, 20 nt, Homo sapiens
gccuggccgaucugaucgag

SEQ ID NO: 886 - RNA, 20 nt, Homo sapiens
uccagcuggaaacucacuau

SEQ ID NO: 887 - RNA, 20 nt, Homo sapiens
uuccacggcccaauccacug

SEQ ID NO: 888 - RNA, 20 nt, Homo sapiens
cacacgccaugaaccugugg

SEQ ID NO: 889 - RNA, 20 nt, Homo sapiens
gcugggcugauaaguaccac

SEQ ID NO: 890 - RNA, 20 nt, Homo sapiens
acaauguugaccacaccagg

SEQ ID NO: 891 - RNA, 20 nt, Homo sapiens
ggaccauguccaaauccacc

SEQ ID NO: 892 - RNA, 20 nt, Homo sapiens
ggccgccauugccucccaug

SEQ ID NO: 893 - RNA, 20 nt, Homo sapiens
agccuuggcaacuggaaacg

SEQ ID NO: 894 - RNA, 20 nt, Homo sapiens
uggauuacgcggccaaucug

SEQ ID NO: 895 - RNA, 20 nt, Homo sapiens
ccgcauggacgcaucacaca

SEQ ID NO: 896 - RNA, 20 nt, Homo sapiens
cacaauguugaccacaccag

SEQ ID NO: 897 - RNA, 20 nt, Homo sapiens
cuacacacgccaugaaccug

SEQ ID NO: 898 - RNA, 20 nt, Homo sapiens
uuccaugcuugcaucaggag

SEQ ID NO: 899 - RNA, 20 nt, Homo sapiens
caguggacggauugacggug

SEQ ID NO: 900 - RNA, 20 nt, Homo sapiens
ggcugggcugauaaguacca

SEQ ID NO: 901 - RNA, 20 nt, Homo sapiens
gccgcauggacgcaucacac

SEQ ID NO: 902 - RNA, 20 nt, Homo sapiens
uggacgcaucacacaggggc

SEQ ID NO: 903 - RNA, 20 nt, Homo sapiens
gcacaauguugaccacacca

SEQ ID NO: 904 - RNA, 20 nt, Homo sapiens
auagauguccuccugcacga

SEQ ID NO: 905 - RNA, 20 nt, Homo sapiens
gaccucgggcugcugguugg

SEQ ID NO: 906 - RNA, 20 nt, Homo sapiens
guagccauaagguccgcucu

SEQ ID NO: 907 - RNA, 20 nt, Homo sapiens
gcucucggacgggaggaacg

SEQ ID NO: 908 - RNA, 20 nt, Homo sapiens
ggcggcgcagccggucaacg

SEQ ID NO: 909 - RNA, 20 nt, Homo sapiens
cugagguuugcguagaccgg

SEQ ID NO: 910 - RNA, 20 nt, Homo sapiens
aagguccgcucucggacggg

SEQ ID NO: 911 - RNA, 20 nt, Homo sapiens
ugaaccuggccgacccagug

SEQ ID NO: 912 - RNA, 20 nt, Homo sapiens
ccauaagguccgcucucgga

SEQ ID NO: 913 - RNA, 20 nt, Homo sapiens
cauaagguccgcucucggac

SEQ ID NO: 914 - RNA, 20 nt, Homo sapiens
ccuccucaccucgcccgacg

SEQ ID NO: 915 - RNA, 20 nt, Homo sapiens
cacgcugcccagcgucacgu

SEQ ID NO: 916 - RNA, 20 nt, Homo sapiens
cugaaccuggccgacccagu

SEQ ID NO: 917 - RNA, 20 nt, Homo sapiens
ccugccaccgaggcuaccgc

SEQ ID NO: 918 - RNA, 20 nt, Homo sapiens
uccucaccucgcccgacgug

SEQ ID NO: 919 - RNA, 20 nt, Homo sapiens
gccccacgucgggcgaggug

SEQ ID NO: 920 - RNA, 20 nt, Homo sapiens
uugggguuacuguagccaua

SEQ ID NO: 921 - RNA, 20 nt, Homo sapiens
aaccucagcaacuucaaccc

SEQ ID NO: 922 - RNA, 20 nt, Homo sapiens
ggcucccgcgguagccucgg

SEQ ID NO: 923 - RNA, 20 nt, Homo sapiens
cugauaauccaguccagcaa

SEQ ID NO: 924 - RNA, 20 nt, Homo sapiens
accaugccugccccguugac

SEQ ID NO: 925 - RNA, 20 nt, Homo sapiens
ugauaauccaguccagcaac

SEQ ID NO: 926 - RNA, 20 nt, Homo sapiens
ccacgucgggcgaggugagg

SEQ ID NO: 927 - RNA, 20 nt, Homo sapiens
gguccgaguucuuggcgcgg

SEQ ID NO: 928 - RNA, 20 nt, Homo sapiens
gggguugcgcgggaaaggcc

SEQ ID NO: 929 - RNA, 20 nt, Homo sapiens
caagaacgugacagaugagc

SEQ ID NO: 930 - RNA, 20 nt, Homo sapiens
ugcugcacgggcaucugcug

SEQ ID NO: 931 - RNA, 20 nt, Homo sapiens
caggcgacgaguuugaacug

SEQ ID NO: 932 - RNA, 20 nt, Homo sapiens
aguuugaacugcgguaccgg

SEQ ID NO: 933 - RNA, 20 nt, Homo sapiens
gaccccaguuuaccccaucc

SEQ ID NO: 934 - RNA, 20 nt, Homo sapiens
cccagcuccacaucacccca

SEQ ID NO: 935 - RNA, 20 nt, Homo sapiens
uuccgggaugggguaaacug

SEQ ID NO: 936 - RNA, 20 nt, Homo sapiens
ucaggucacugaaugcccgc

SEQ ID NO: 937 - RNA, 20 nt, Homo sapiens
agcaguaaagcaagcgcuga

SEQ ID NO: 938 - RNA, 20 nt, Homo sapiens
gguaaacuggggucgcauug

SEQ ID NO: 939 - RNA, 20 nt, Homo sapiens
uuucccagaaaggauacagc

SEQ ID NO: 940 - RNA, 20 nt, Homo sapiens
acgaguuugaacugcgguac

SEQ ID NO: 941 - RNA, 20 nt, Homo sapiens
cuugcuuuacugcugccaug

SEQ ID NO: 942 - RNA, 20 nt, Homo sapiens
gccaguggcuccauucaccg

SEQ ID NO: 943 - RNA, 20 nt, Homo sapiens
cuccgauucagucccuucug

SEQ ID NO: 944 - RNA, 20 nt, Homo sapiens
cagcaguuuggaugcccggg

SEQ ID NO: 945 - RNA, 20 nt, Homo sapiens
uguggaagagaacaggacug

SEQ ID NO: 946 - RNA, 20 nt, Homo sapiens
cuggagucaguuuagugaug

SEQ ID NO: 947 - RNA, 20 nt, Homo sapiens
aguaaagcaagcgcugaggg

SEQ ID NO: 948 - RNA, 20 nt, Homo sapiens
guuugaacugcgguaccggc

SEQ ID NO: 949 - RNA, 20 nt, Homo sapiens
ugaaugaacucuuccgggau

SEQ ID NO: 950 - RNA, 20 nt, Homo sapiens
gcucugauaugcugucccug

SEQ ID NO: 951 - RNA, 20 nt, Homo sapiens
caguggcuccauucaccgcg

SEQ ID NO: 952 - RNA, 20 nt, Homo sapiens
gagacccccagugccaucaa

SEQ ID NO: 953 - RNA, 20 nt, Homo sapiens
ggccccagaagggacugaau

SEQ ID NO: 954 - RNA, 20 nt, Homo sapiens
ccaucaauggcaacccaucc

SEQ ID NO: 955 - RNA, 20 nt, Homo sapiens
cacgcacagugccccgccga

SEQ ID NO: 956 - RNA, 20 nt, Homo sapiens
ggccuucuuugaguucggug

SEQ ID NO: 957 - RNA, 20 nt, Homo sapiens
uggacaucucggcgaagucg

SEQ ID NO: 958 - RNA, 20 nt, Homo sapiens
ugucgcagaggggcuacgag

SEQ ID NO: 959 - RNA, 20 nt, Homo sapiens
cguggcaaagcguccccgcg

SEQ ID NO: 960 - RNA, 20 nt, Homo sapiens
cugacgcccuucaccgcgcg

SEQ ID NO: 961 - RNA, 20 nt, Homo sapiens
cauuauaagcugucgcagag

SEQ ID NO: 962 - RNA, 20 nt, Homo sapiens
acaucucggcgaagucgcgg

SEQ ID NO: 963 - RNA, 20 nt, Homo sapiens
auuguggccuucuuugaguu

SEQ ID NO: 964 - RNA, 20 nt, Homo sapiens
gaccccaccgaacucaaaga

SEQ ID NO: 965 - RNA, 20 nt, Homo sapiens
aagcguccccgcgcggugaa

SEQ ID NO: 966 - RNA, 20 nt, Homo sapiens
gcggggacgcuuugccacgg

SEQ ID NO: 967 - RNA, 20 nt, Homo sapiens
ccauuauaagcugucgcaga

SEQ ID NO: 968 - RNA, 20 nt, Homo sapiens
cgcgcggggacgcuuugcca

SEQ ID NO: 969 - RNA, 20 nt, Homo sapiens
uguacuucaucacuaucucc

SEQ ID NO: 970 - RNA, 20 nt, Homo sapiens
gcggcgagguccuggcgacc

SEQ ID NO: 971 - RNA, 20 nt, Homo sapiens
gucgcagaggggcuacgagu

SEQ ID NO: 972 - RNA, 20 nt, Homo sapiens
gccccauccagccgcauccc

SEQ ID NO: 973 - RNA, 20 nt, Homo sapiens
aggggcuacgagugggaugc

SEQ ID NO: 974 - RNA, 20 nt, Homo sapiens
gaggggcuacgagugggaug

SEQ ID NO: 975 - RNA, 20 nt, Homo sapiens
accugacgcccuucaccgcg

SEQ ID NO: 976 - RNA, 20 nt, Homo sapiens
gcggcgggagaagucgucgc

SEQ ID NO: 977 - RNA, 20 nt, Homo sapiens
agaagucgucgccggccugg

SEQ ID NO: 978 - RNA, 20 nt, Homo sapiens
aggagaagaugcccggugcg

SEQ ID NO: 979 - RNA, 20 nt, Homo sapiens
ggaggagcucuucagggacg

SEQ ID NO: 980 - RNA, 20 nt, Homo sapiens
gguggcaccgggcugagcgc

SEQ ID NO: 981 - RNA, 20 nt, Homo sapiens
guuucauccaggaucgagca

SEQ ID NO: 982 - RNA, 20 nt, Homo sapiens
ucggaaaaagaccucucggg

SEQ ID NO: 983 - RNA, 20 nt, Homo sapiens
ggacacagacuccccccgag

SEQ ID NO: 984 - RNA, 20 nt, Homo sapiens
cgagugucucaagcgcaucg

SEQ ID NO: 985 - RNA, 20 nt, Homo sapiens
acucggaaaaagaccucucg

SEQ ID NO: 986 - RNA, 20 nt, Homo sapiens
cucggaaaaagaccucucgg

SEQ ID NO: 987 - RNA, 20 nt, Homo sapiens
aguuucauccaggaucgagc

SEQ ID NO: 988 - RNA, 20 nt, Homo sapiens
aguagaaaagggcgacaacc

SEQ ID NO: 989 - RNA, 20 nt, Homo sapiens
gggggagucuguguccacgg

SEQ ID NO: 990 - RNA, 20 nt, Homo sapiens
cugcaggaugauugccgccg

SEQ ID NO: 991 - RNA, 20 nt, Homo sapiens
ccacucggaaaaagaccucu

SEQ ID NO: 992 - RNA, 20 nt, Homo sapiens
ucugacggcaacuucaacug

SEQ ID NO: 993 - RNA, 20 nt, Homo sapiens
agcaaacuggugcucaaggu

SEQ ID NO: 994 - RNA, 20 nt, Homo sapiens
agcgagugucucaagcgcau

SEQ ID NO: 995 - RNA, 20 nt, Homo sapiens
uccccacucuaguuucaucc

SEQ ID NO: 996 - RNA, 20 nt, Homo sapiens
uucuugguggacgcauccug

SEQ ID NO: 997 - RNA, 20 nt, Homo sapiens
uggacgcauccugaggcacc

SEQ ID NO: 998 - RNA, 20 nt, Homo sapiens
cacucggaaaaagaccucuc

SEQ ID NO: 999 - RNA, 20 nt, Homo sapiens
aggaucgagcagggcgaaug

SEQ ID NO: 1000 - RNA, 20 nt, Homo sapiens
augaucugcucagagcuggu

SEQ ID NO: 1001 - RNA, 20 nt, Homo sapiens
aaaacaugucagcugccacu

SEQ ID NO: 1002 - RNA, 20 nt, Homo sapiens
uucugacggcaacuucaacu

SEQ ID NO: 1003 - RNA, 20 nt, Homo sapiens
acaguaacauggagcugcag

SEQ ID NO: 1004 - RNA, 20 nt, Homo sapiens
gaucgagcagggcgaauggg

SEQ ID NO: 1005 - RNA, 20 nt, Homo sapiens
ggacgaacuggacaguaaca

SEQ ID NO: 1006 - RNA, 20 nt, Homo sapiens
acaucugaaggauccggaca

SEQ ID NO: 1007 - RNA, 20 nt, Homo sapiens
uaauccauucgaucucacca

SEQ ID NO: 1008 - RNA, 20 nt, Homo sapiens
uuauuacaguagggccccgu

SEQ ID NO: 1009 - RNA, 20 nt, Homo sapiens
uggauguaaaaaguccagga

SEQ ID NO: 1010 - RNA, 20 nt, Homo sapiens
cuggauguaaaaaguccagg

SEQ ID NO: 1011 - RNA, 20 nt, Homo sapiens
gacuacccucucaucccagu

SEQ ID NO: 1012 - RNA, 20 nt, Homo sapiens
aauuucacugcaaacccacg

SEQ ID NO: 1013 - RNA, 20 nt, Homo sapiens
acacaguucgggacccucgu

SEQ ID NO: 1014 - RNA, 20 nt, Homo sapiens
guggagaaccgaacugcgau

SEQ ID NO: 1015 - RNA, 20 nt, Homo sapiens
ugacauuaccaaauacucca

SEQ ID NO: 1016 - RNA, 20 nt, Homo sapiens
ggauguaaaaaguccaggag

SEQ ID NO: 1017 - RNA, 20 nt, Homo sapiens
cuuucuuguucagugaucgg

SEQ ID NO: 1018 - RNA, 20 nt, Homo sapiens
gugauccauauccauucaug

SEQ ID NO: 1019 - RNA, 20 nt, Homo sapiens
augagaggguaguccuugug

SEQ ID NO: 1020 - RNA, 20 nt, Homo sapiens
caagcugguuaaugcaaaug

SEQ ID NO: 1021 - RNA, 20 nt, Homo sapiens
auuucacugcaaacccacga

SEQ ID NO: 1022 - RNA, 20 nt, Homo sapiens
gcugguuaaugcaaaugggg

SEQ ID NO: 1023 - RNA, 20 nt, Homo sapiens
gaugcagagacucaggacgu

SEQ ID NO: 1024 - RNA, 20 nt, Homo sapiens
gaugguaacugggaucucgu

SEQ ID NO: 1025 - RNA, 20 nt, Homo sapiens
aguggagaaccgaacugcga

SEQ ID NO: 1026 - RNA, 20 nt, Homo sapiens
auaaaccaacuuaccaacag

SEQ ID NO: 1027 - RNA, 20 nt, Homo sapiens
cucaccuuggugagaucgaa

SEQ ID NO: 1028 - RNA, 20 nt, Homo sapiens
gagagaguugugcaugcuaa

SEQ ID NO: 1029 - RNA, 20 nt, Homo sapiens
caacaugccaccuggcauug

SEQ ID NO: 1030 - RNA, 20 nt, Homo sapiens
agaugcggcgagacuuuccc

SEQ ID NO: 1031 - RNA, 20 nt, Homo sapiens
uaaggauacgaucuguaccu

SEQ ID NO: 1032 - RNA, 20 nt, Homo sapiens
ucgcuacuacagagcacccg

SEQ ID NO: 1033 - RNA, 20 nt, Homo sapiens
ugauauuagauauugaucag

SEQ ID NO: 1034 - RNA, 20 nt, Homo sapiens
agaaucagacucaugccaag

SEQ ID NO: 1035 - RNA, 20 nt, Homo sapiens
cagcaucugauagagaaggu

SEQ ID NO: 1036 - RNA, 20 nt, Homo sapiens
augggagaaaugaucaaagg

SEQ ID NO: 1037 - RNA, 20 nt, Homo sapiens
cuucucuaucagaugcugug

SEQ ID NO: 1038 - RNA, 20 nt, Homo sapiens
cauaagaacuagcucucugu

SEQ ID NO: 1039 - RNA, 20 nt, Homo sapiens
ucaacguaaguccuuacugu

SEQ ID NO: 1040 - RNA, 20 nt, Homo sapiens
uaguagcgagucacuacaua

SEQ ID NO: 1041 - RNA, 20 nt, Homo sapiens
ucuuugccaagugauucaga

SEQ ID NO: 1042 - RNA, 20 nt, Homo sapiens
agaaacugcaaccaacagua

SEQ ID NO: 1043 - RNA, 20 nt, Homo sapiens
cuagcuccaucugaaucacu

SEQ ID NO: 1044 - RNA, 20 nt, Homo sapiens
cccgaggucauccuuggcau

SEQ ID NO: 1045 - RNA, 20 nt, Homo sapiens
aauuuaaaaccuauaggcuc

SEQ ID NO: 1046 - RNA, 20 nt, Homo sapiens
cccaugccaaggaugaccuc

SEQ ID NO: 1047 - RNA, 20 nt, Homo sapiens
auaaggauacgaucuguacc

SEQ ID NO: 1048 - RNA, 20 nt, Homo sapiens
gaaaacagaccuaaauaugc

SEQ ID NO: 1049 - RNA, 20 nt, Homo sapiens
gaaucagacucaugccaagc

SEQ ID NO: 1050 - RNA, 20 nt, Homo sapiens
gaauaauuccagcagaauga

SEQ ID NO: 1051 - RNA, 20 nt, Homo sapiens
uucuucaugaauucaggaca

SEQ ID NO: 1052 - RNA, 20 nt, Homo sapiens
gcccaugccaaggaugaccu

SEQ ID NO: 1053 - RNA, 20 nt, Homo sapiens
aauucuucuagggauuucug

SEQ ID NO: 1054 - RNA, 20 nt, Homo sapiens
gaagauucuugacuucgguc

SEQ ID NO: 1055 - RNA, 20 nt, Homo sapiens
cagcugggaaaaggacauca

SEQ ID NO: 1056 - RNA, 20 nt, Homo sapiens
acucggagcguagaaucaug

SEQ ID NO: 1057 - RNA, 20 nt, Homo sapiens
cucacgauacuccuggacgu

SEQ ID NO: 1058 - RNA, 20 nt, Homo sapiens
gggagcagcaaaucccauga

SEQ ID NO: 1059 - RNA, 20 nt, Homo sapiens
guguaacguuccaugacagg

SEQ ID NO: 1060 - RNA, 20 nt, Homo sapiens
uuccauggucaaaccucaca

SEQ ID NO: 1061 - RNA, 20 nt, Homo sapiens
cugguguaagaagucucugg

SEQ ID NO: 1062 - RNA, 20 nt, Homo sapiens
ugccaccgccgcgaccaaug

SEQ ID NO: 1063 - RNA, 20 nt, Homo sapiens
cuggugguauccagccguaa

SEQ ID NO: 1064 - RNA, 20 nt, Homo sapiens
ucccuucaccaacaagcgaa

SEQ ID NO: 1065 - RNA, 20 nt, Homo sapiens
gagguguaacguuccaugac

SEQ ID NO: 1066 - RNA, 20 nt, Homo sapiens
uuucaaaugacccuuacggc

SEQ ID NO: 1067 - RNA, 20 nt, Homo sapiens
cccaugaaggaacggcucga

SEQ ID NO: 1068 - RNA, 20 nt, Homo sapiens
ggccucaccuugaccaugug

SEQ ID NO: 1069 - RNA, 20 nt, Homo sapiens
ggucaaaccucacaugguca

SEQ ID NO: 1070 - RNA, 20 nt, Homo sapiens
uuacucggagcguagaauca

SEQ ID NO: 1071 - RNA, 20 nt, Homo sapiens
gcacaaacucacgauacucc

SEQ ID NO: 1072 - RNA, 20 nt, Homo sapiens
uacucggagcguagaaucau

SEQ ID NO: 1073 - RNA, 20 nt, Homo sapiens
uucuccuagguacucaaugc

SEQ ID NO: 1074 - RNA, 20 nt, Homo sapiens
cccucucaccucauuggucg

SEQ ID NO: 1075 - RNA, 20 nt, Homo sapiens
accagagacuucuuacacca

SEQ ID NO: 1076 - RNA, 20 nt, Homo sapiens
ucuggugguauccagccgua

SEQ ID NO: 1077 - RNA, 20 nt, Homo sapiens
caccagagacuucuuacacc

SEQ ID NO: 1078 - RNA, 20 nt, Homo sapiens
ucgggcugcccagaucuugg

SEQ ID NO: 1079 - RNA, 20 nt, Homo sapiens
ggucccagcugggacgcgcg

SEQ ID NO: 1080 - RNA, 20 nt, Homo sapiens
gcucagcccgggcgcgcaac

SEQ ID NO: 1081 - RNA, 20 nt, Homo sapiens
gauguauaucgcuccaacac

SEQ ID NO: 1082 - RNA, 20 nt, Homo sapiens
uguaggcaucuuguacugau

SEQ ID NO: 1083 - RNA, 20 nt, Homo sapiens
guauaucgcuccaacacagg

SEQ ID NO: 1084 - RNA, 20 nt, Homo sapiens
ugauguaguaucgggagugg

SEQ ID NO: 1085 - RNA, 20 nt, Homo sapiens
ccguccgaagucggcgacag

SEQ ID NO: 1086 - RNA, 20 nt, Homo sapiens
ggaaauguaugauguaguau

SEQ ID NO: 1087 - RNA, 20 nt, Homo sapiens
ccggccgcugucgccgacuu

SEQ ID NO: 1088 - RNA, 20 nt, Homo sapiens
cucgggaugccguccgaagu

SEQ ID NO: 1089 - RNA, 20 nt, Homo sapiens
ccgcugucgccgacuucgga

SEQ ID NO: 1090 - RNA, 20 nt, Homo sapiens
ugauuaccugccauuccgca

SEQ ID NO: 1091 - RNA, 20 nt, Homo sapiens
gccuugagaaggguagucuc

SEQ ID NO: 1092 - RNA, 20 nt, Homo sapiens
acuguuaccuuuacuaaaug

SEQ ID NO: 1093 - RNA, 20 nt, Homo sapiens
gauuaccugccauuccgcac

SEQ ID NO: 1094 - RNA, 20 nt, Homo sapiens
gaaauguaugauguaguauc

SEQ ID NO: 1095 - RNA, 20 nt, Homo sapiens
guucgugcacauaucuccuu

SEQ ID NO: 1096 - RNA, 20 nt, Homo sapiens
guaugauguaguaucgggag

SEQ ID NO: 1097 - RNA, 20 nt, Homo sapiens
gcgcaggcgcccgugcggaa

SEQ ID NO: 1098 - RNA, 20 nt, Homo sapiens
uuguaggcaucuuguacuga

SEQ ID NO: 1099 - RNA, 20 nt, Homo sapiens
ggugaaaccucauuuaguaa

SEQ ID NO: 1100 - RNA, 20 nt, Homo sapiens
auauacaucaguaguaaccu

SEQ ID NO: 1101 - RNA, 20 nt, Homo sapiens
uaucuccuuaggcaaaauug

SEQ ID NO: 1102 - RNA, 20 nt, Homo sapiens
gauguuauaucaaagagauc

SEQ ID NO: 1103 - RNA, 20 nt, Homo sapiens
ggcaaaauugagguauguag

SEQ ID NO: 1104 - RNA, 20 nt, Homo sapiens
uucagauauuuagcuuccug

SEQ ID NO: 1105 - RNA, 20 nt, Homo sapiens
cugcaccauuaauaaacaaa

SEQ ID NO: 1106 - RNA, 20 nt, Homo sapiens
ggugaugcacggcuacaagg

SEQ ID NO: 1107 - RNA, 20 nt, Homo sapiens
uguccccgcaaagaacaggu

SEQ ID NO: 1108 - RNA, 20 nt, Homo sapiens
ggacgguaucaccgugacug

SEQ ID NO: 1109 - RNA, 20 nt, Homo sapiens
gagcgcuuguacacaaugga

SEQ ID NO: 1110 - RNA, 20 nt, Homo sapiens
ugcagagcgcuuguacacaa

SEQ ID NO: 1111 - RNA, 20 nt, Homo sapiens
augaaauacccugagaucga

SEQ ID NO: 1112 - RNA, 20 nt, Homo sapiens
cauuguagucaaaaugcuug

SEQ ID NO: 1113 - RNA, 20 nt, Homo sapiens
gaagcacucaggaagaccca

SEQ ID NO: 1114 - RNA, 20 nt, Homo sapiens
uggccgaccuguucuuugcg

SEQ ID NO: 1115 - RNA, 20 nt, Homo sapiens
cccuccggaacuaugggaug

SEQ ID NO: 1116 - RNA, 20 nt, Homo sapiens
gcacggcuacaaggcgguga

SEQ ID NO: 1117 - RNA, 20 nt, Homo sapiens
ugcagggcgcgcagccgaug

SEQ ID NO: 1118 - RNA, 20 nt, Homo sapiens
cccacguacagcgugaacac

SEQ ID NO: 1119 - RNA, 20 nt, Homo sapiens
augucggcuaugacguugca

SEQ ID NO: 1120 - RNA, 20 nt, Homo sapiens
ccgguguucacgcuguacgu

SEQ ID NO: 1121 - RNA, 20 nt, Homo sapiens
caaugagagccggauccaga

SEQ ID NO: 1122 - RNA, 20 nt, Homo sapiens
cauuuccacgagcaggcagu

SEQ ID NO: 1123 - RNA, 20 nt, Homo sapiens
uauucccaaguccuucaccc

SEQ ID NO: 1124 - RNA, 20 nt, Homo sapiens
ggguggucagggaaaaccgc

SEQ ID NO: 1125 - RNA, 20 nt, Homo sapiens
gcaaugagagccggauccag

SEQ ID NO: 1126 - RNA, 20 nt, Homo sapiens
ugugcgcauggaacgcgggg

SEQ ID NO: 1127 - RNA, 20 nt, Homo sapiens
gguucccgaugaugggaagc

SEQ ID NO: 1128 - RNA, 20 nt, Homo sapiens
uccaccuacucagcacuccc

SEQ ID NO: 1129 - RNA, 20 nt, Homo sapiens
cagaaaagucauaaaaaaug

SEQ ID NO: 1130 - RNA, 20 nt, Homo sapiens
ggaggcaggugcacagcagc

SEQ ID NO: 1131 - RNA, 20 nt, Homo sapiens
acagccgccaauaagaacaa

SEQ ID NO: 1132 - RNA, 20 nt, Homo sapiens
ucuuguuuaggcaucaucug

SEQ ID NO: 1133 - RNA, 20 nt, Homo sapiens
aucuccauggucucuuuggg

SEQ ID NO: 1134 - RNA, 20 nt, Homo sapiens
ucuuccgcccaaagagacca

SEQ ID NO: 1135 - RNA, 20 nt, Homo sapiens
ggcuguguaagaguauccag

SEQ ID NO: 1136 - RNA, 20 nt, Homo sapiens
cuuugggcggaagacagguc

SEQ ID NO: 1137 - RNA, 20 nt, Homo sapiens
ugccacaccguugaaaaggg

SEQ ID NO: 1138 - RNA, 20 nt, Homo sapiens
uucuuguuuaggcaucaucu

SEQ ID NO: 1139 - RNA, 20 nt, Homo sapiens
cuuaccuuuguucuuauugg

SEQ ID NO: 1140 - RNA, 20 nt, Homo sapiens
cagugccacaccguugaaaa

SEQ ID NO: 1141 - RNA, 20 nt, Homo sapiens
ggucucuuugggcggaagac

SEQ ID NO: 1142 - RNA, 20 nt, Homo sapiens
aagacugggccaaaucucca

SEQ ID NO: 1143 - RNA, 20 nt, Homo sapiens
cuggggagaggauacacuga

SEQ ID NO: 1144 - RNA, 20 nt, Homo sapiens
cggcuguguaagaguaucca

SEQ ID NO: 1145 - RNA, 20 nt, Homo sapiens
uuuaggcaucaucuggggag

SEQ ID NO: 1146 - RNA, 20 nt, Homo sapiens
gcggcuguguaagaguaucc

SEQ ID NO: 1147 - RNA, 20 nt, Homo sapiens
aaucccaagaaguacauccc

SEQ ID NO: 1148 - RNA, 20 nt, Homo sapiens
uuucuuguuuaggcaucauc

SEQ ID NO: 1149 - RNA, 20 nt, Homo sapiens
acucuuaccuuuguucuuau

SEQ ID NO: 1150 - RNA, 20 nt, Homo sapiens
ccagugccacaccguugaaa

SEQ ID NO: 1151 - RNA, 20 nt, Homo sapiens
cuuugucggcauuaagaaga

SEQ ID NO: 1152 - RNA, 20 nt, Homo sapiens
aauaugggugauguugagaa

SEQ ID NO: 1153 - RNA, 20 nt, Homo sapiens
agggaggcaagcacaagacu

SEQ ID NO: 1154 - RNA, 20 nt, Homo sapiens
ggaacaaaaaugaucuuugu

SEQ ID NO: 1155 - RNA, 20 nt, Homo sapiens
cggaagacaggucaggcccc

SEQ ID NO: 1156 - RNA, 20 nt, Homo sapiens
uccugacuucagagcacgag

SEQ ID NO: 1157 - RNA, 20 nt, Homo sapiens
gcagaguguguccucuucag

SEQ ID NO: 1158 - RNA, 20 nt, Homo sapiens
cacguagcaugccagcacca

SEQ ID NO: 1159 - RNA, 20 nt, Homo sapiens
cuccgcaaauaccacugaag

SEQ ID NO: 1160 - RNA, 20 nt, Homo sapiens
ugaagaaggggagcaucucg

SEQ ID NO: 1161 - RNA, 20 nt, Homo sapiens
gcacucacugagaugcuugu

SEQ ID NO: 1162 - RNA, 20 nt, Homo sapiens
gagcaucucggggauuacca

SEQ ID NO: 1163 - RNA, 20 nt, Homo sapiens
uugcguuugcagguuacuac

SEQ ID NO: 1164 - RNA, 20 nt, Homo sapiens
aguacaucaaugugaagaag

SEQ ID NO: 1165 - RNA, 20 nt, Homo sapiens
augcgggacuucaguccuag

SEQ ID NO: 1166 - RNA, 20 nt, Homo sapiens
caaguacaucaaugugaaga

SEQ ID NO: 1167 - RNA, 20 nt, Homo sapiens
ugauguacuuguuguaguac

SEQ ID NO: 1168 - RNA, 20 nt, Homo sapiens
acuucuggaggucaaacugg

SEQ ID NO: 1169 - RNA, 20 nt, Homo sapiens
uuccguuucaguaccaguga

SEQ ID NO: 1170 - RNA, 20 nt, Homo sapiens
acugagaugcuuguaggaaa

SEQ ID NO: 1171 - RNA, 20 nt, Homo sapiens
cucggggauuaccauggugc

SEQ ID NO: 1172 - RNA, 20 nt, Homo sapiens
aaguacaucaaugugaagaa

SEQ ID NO: 1173 - RNA, 20 nt, Homo sapiens
gaaggacaagaaacuucugg

SEQ ID NO: 1174 - RNA, 20 nt, Homo sapiens
gacuccaaaauggcgucagu

SEQ ID NO: 1175 - RNA, 20 nt, Homo sapiens
ugugaagaaggggagcaucu

SEQ ID NO: 1176 - RNA, 20 nt, Homo sapiens
ucccgcaucaagauccagcu

SEQ ID NO: 1177 - RNA, 20 nt, Homo sapiens
aacgcuccgaaaaugccacu

SEQ ID NO: 1178 - RNA, 20 nt, Homo sapiens
guccucuucagugguauuug

SEQ ID NO: 1179 - RNA, 20 nt, Homo sapiens
gccaagcuggaucuugaugc

SEQ ID NO: 1180 - RNA, 20 nt, Homo sapiens
cucaccaacugacgccauuu

SEQ ID NO: 1181 - RNA, 20 nt, Homo sapiens
gguggacgcggucgucaugg

SEQ ID NO: 1182 - RNA, 20 nt, Homo sapiens
ggguuccaauacucacaugg

SEQ ID NO: 1183 - RNA, 20 nt, Homo sapiens
caccauggacagguaaacgu

SEQ ID NO: 1184 - RNA, 20 nt, Homo sapiens
uguucaccuugauauccuga

SEQ ID NO: 1185 - RNA, 20 nt, Homo sapiens
gggguuccaauacucacaug

SEQ ID NO: 1186 - RNA, 20 nt, Homo sapiens
augaagcugcagaaccaacg

SEQ ID NO: 1187 - RNA, 20 nt, Homo sapiens
cuccuacguuuaccugucca

SEQ ID NO: 1188 - RNA, 20 nt, Homo sapiens
agagcuccagguugaucugg

SEQ ID NO: 1189 - RNA, 20 nt, Homo sapiens
ucuugcgcaaguuggucacg

SEQ ID NO: 1190 - RNA, 20 nt, Homo sapiens
cauggacagguaaacguagg

SEQ ID NO: 1191 - RNA, 20 nt, Homo sapiens
aagcugcagaaccaacgagg

SEQ ID NO: 1192 - RNA, 20 nt, Homo sapiens
cgcccgcgcucaccauggac

SEQ ID NO: 1193 - RNA, 20 nt, Homo sapiens
ggagagcgggcugaaugcaa

SEQ ID NO: 1194 - RNA, 20 nt, Homo sapiens
cgugaccaacuugcgcaaga

SEQ ID NO: 1195 - RNA, 20 nt, Homo sapiens
caucaaccgccagaucaacc

SEQ ID NO: 1196 - RNA, 20 nt, Homo sapiens
ucuucaaagccacaucaucg

SEQ ID NO: 1197 - RNA, 20 nt, Homo sapiens
gcgcaccugcgagguggacg

SEQ ID NO: 1198 - RNA, 20 nt, Homo sapiens
agcgcccgaaucuggcuugg

SEQ ID NO: 1199 - RNA, 20 nt, Homo sapiens
uggcggccucugaguccugg

SEQ ID NO: 1200 - RNA, 20 nt, Homo sapiens
cucuuugacaagcacacccu

SEQ ID NO: 1201 - RNA, 20 nt, Homo sapiens
guugaucuggcgguugaugg

SEQ ID NO: 1202 - RNA, 20 nt, Homo sapiens
guucuggcgcaccugcgagg

SEQ ID NO: 1203 - RNA, 20 nt, Homo sapiens
uauuccgccaagccagauuc

SEQ ID NO: 1204 - RNA, 20 nt, Homo sapiens
aaucuuccuucaggauauca

SEQ ID NO: 1205 - RNA, 20 nt, Homo sapiens
auauuccgccaagccagauu

SEQ ID NO: 1206 - RNA, 20 nt, Homo sapiens
cuugaaggugaggauaacgc

SEQ ID NO: 1207 - RNA, 20 nt, Homo sapiens
agaggugcaggccaacaaug

SEQ ID NO: 1208 - RNA, 20 nt, Homo sapiens
gacgacggcugcaaaagugg

SEQ ID NO: 1209 - RNA, 20 nt, Homo sapiens
cuugcccccgaccgucuacg

SEQ ID NO: 1210 - RNA, 20 nt, Homo sapiens
ugcccguucccgccucacag

SEQ ID NO: 1211 - RNA, 20 nt, Homo sapiens
acggccucguagacggucgg

SEQ ID NO: 1212 - RNA, 20 nt, Homo sapiens
aggcuggaaccgcaucaucg

SEQ ID NO: 1213 - RNA, 20 nt, Homo sapiens
cugguccucacggaacaggg

SEQ ID NO: 1214 - RNA, 20 nt, Homo sapiens
gaucugguccucacggaaca

SEQ ID NO: 1215 - RNA, 20 nt, Homo sapiens
ucguggagaagcccuucggg

SEQ ID NO: 1216 - RNA, 20 nt, Homo sapiens
gauggggccgaagauccugu

SEQ ID NO: 1217 - RNA, 20 nt, Homo sapiens
ggugggacacacuuaccaga

SEQ ID NO: 1218 - RNA, 20 nt, Homo sapiens
gugguccugggccaguacgu

SEQ ID NO: 1219 - RNA, 20 nt, Homo sapiens
aucguacuggccagccacau

SEQ ID NO: 1220 - RNA, 20 nt, Homo sapiens
guggggaaccccgauggaga

SEQ ID NO: 1221 - RNA, 20 nt, Homo sapiens
ccgcgacccucagugccaaa

SEQ ID NO: 1222 - RNA, 20 nt, Homo sapiens
aggguaccuggacgacccca

SEQ ID NO: 1223 - RNA, 20 nt, Homo sapiens
gggacacacuuaccagaugg

SEQ ID NO: 1224 - RNA, 20 nt, Homo sapiens
guggcggugguggacccgcg

SEQ ID NO: 1225 - RNA, 20 nt, Homo sapiens
gguucugcaucacgucccug

SEQ ID NO: 1226 - RNA, 20 nt, Homo sapiens
gcccgaaaacaccuucaucg

SEQ ID NO: 1227 - RNA, 20 nt, Homo sapiens
ugguccugggccaguacgug

SEQ ID NO: 1228 - RNA, 20 nt, Homo sapiens
acggacgucaucugaguugg

SEQ ID NO: 1229 - RNA, 20 nt, Homo sapiens
gacacagcaucugcaguagg

SEQ ID NO: 1230 - RNA, 20 nt, Homo sapiens
gggcgaugccuuccaucagu

SEQ ID NO: 1231 - RNA, 20 nt, Homo sapiens
aggccaacaugcgaaaacgc

SEQ ID NO: 1232 - RNA, 20 nt, Homo sapiens
agaaauauccgacauaggag

SEQ ID NO: 1233 - RNA, 20 nt, Homo sapiens
uaacaagaaauauccgacau

SEQ ID NO: 1234 - RNA, 20 nt, Homo sapiens
caaugucugacacauagccu

SEQ ID NO: 1235 - RNA, 20 nt, Homo sapiens
cguucucaaguggggcgaug

SEQ ID NO: 1236 - RNA, 20 nt, Homo sapiens
gacagcuauuuaucuaagug

SEQ ID NO: 1237 - RNA, 20 nt, Homo sapiens
ggccucaacuguauugaacu

SEQ ID NO: 1238 - RNA, 20 nt, Homo sapiens
gauagaacucgggaggagcg

SEQ ID NO: 1239 - RNA, 20 nt, Homo sapiens
caucuguagaugauagaacu

SEQ ID NO: 1240 - RNA, 20 nt, Homo sapiens
uguagaugauagaacucggg

SEQ ID NO: 1241 - RNA, 20 nt, Homo sapiens
auugcccauuccaaauccca

SEQ ID NO: 1242 - RNA, 20 nt, Homo sapiens
caugcgaaaacgccggaagg

SEQ ID NO: 1243 - RNA, 20 nt, Homo sapiens
cccuuuggagaccagaguau

SEQ ID NO: 1244 - RNA, 20 nt, Homo sapiens
ugaaaauaaaaaaguccggu

SEQ ID NO: 1245 - RNA, 20 nt, Homo sapiens
caacaugcgaaaacgccgga

SEQ ID NO: 1246 - RNA, 20 nt, Homo sapiens
ucagacauugauugucgcug

SEQ ID NO: 1247 - RNA, 20 nt, Homo sapiens
guccgaguucaauacaguug

SEQ ID NO: 1248 - RNA, 20 nt, Homo sapiens
gcacaucuaccacgccguca

SEQ ID NO: 1249 - RNA, 20 nt, Homo sapiens
agccauacucaccugaagcg

SEQ ID NO: 1250 - RNA, 20 nt, Homo sapiens
accucgggcagugugaaccc

SEQ ID NO: 1251 - RNA, 20 nt, Homo sapiens
cagauaccuuuaugaucagu

SEQ ID NO: 1252 - RNA, 20 nt, Homo sapiens
gccauacucaccugaagcga

SEQ ID NO: 1253 - RNA, 20 nt, Homo sapiens
cgaggucaaacccaacccag

SEQ ID NO: 1254 - RNA, 20 nt, Homo sapiens
ucccauacucuggucuccaa

SEQ ID NO: 1255 - RNA, 20 nt, Homo sapiens
cagacucauuagcaucaucc

SEQ ID NO: 1256 - RNA, 20 nt, Homo sapiens
cgucaguacagucuacaggu

SEQ ID NO: 1257 - RNA, 20 nt, Homo sapiens
accuguagacuguacugacg

SEQ ID NO: 1258 - RNA, 20 nt, Homo sapiens
ggucucuggaccaagaccga

SEQ ID NO: 1259 - RNA, 20 nt, Homo sapiens
gcucauucucuauggcacgc

SEQ ID NO: 1260 - RNA, 20 nt, Homo sapiens
ugaggggaagagcgugaaug

SEQ ID NO: 1261 - RNA, 20 nt, Homo sapiens
agauaucuucaaauguucgu

SEQ ID NO: 1262 - RNA, 20 nt, Homo sapiens
aagcacgucuacugcuggag

SEQ ID NO: 1263 - RNA, 20 nt, Homo sapiens
gcuacugauugcucaagaga

SEQ ID NO: 1264 - RNA, 20 nt, Homo sapiens
ccucucuaauaaucccagca

SEQ ID NO: 1265 - RNA, 20 nt, Homo sapiens
ucaguagcaccagagcacug

SEQ ID NO: 1266 - RNA, 20 nt, Homo sapiens
gccucgucaguacagucuac

SEQ ID NO: 1267 - RNA, 20 nt, Homo sapiens
ccacaagcaaguccuaaaag

SEQ ID NO: 1268 - RNA, 20 nt, Homo sapiens
gagcuaggggcuuaccuccg

SEQ ID NO: 1269 - RNA, 20 nt, Homo sapiens
gcugugguuuacuuccggga

SEQ ID NO: 1270 - RNA, 20 nt, Homo sapiens
uugaagauaucucugaaaag

SEQ ID NO: 1271 - RNA, 20 nt, Homo sapiens
cucucuaauaaucccagcaa

SEQ ID NO: 1272 - RNA, 20 nt, Homo sapiens
gggcuuaccuccgaggaagu

SEQ ID NO: 1273 - RNA, 20 nt, Homo sapiens
gccaaagccugggagcucua

SEQ ID NO: 1274 - RNA, 20 nt, Homo sapiens
ggaaagaguuugcuccagga

SEQ ID NO: 1275 - RNA, 20 nt, Homo sapiens
gacgaggcauguagccaucc

SEQ ID NO: 1276 - RNA, 20 nt, Homo sapiens
gaccccagcugugcaccggu

SEQ ID NO: 1277 - RNA, 20 nt, Homo sapiens
caaauguucgucggaucaca

SEQ ID NO: 1278 - RNA, 20 nt, Homo sapiens
gacccaccggugcacagcug

SEQ ID NO: 1279 - RNA, 20 nt, Homo sapiens
ccagcuggcugggacuaaga

SEQ ID NO: 1280 - RNA, 20 nt, Homo sapiens
gcaggccguggaccgggccc

SEQ ID NO: 1281 - RNA, 20 nt, Homo sapiens
aaguaguaccuugccccgca

SEQ ID NO: 1282 - RNA, 20 nt, Homo sapiens
ggcgucccucugaggcacca

SEQ ID NO: 1283 - RNA, 20 nt, Homo sapiens
caugcucuucgagaagugcg

SEQ ID NO: 1284 - RNA, 20 nt, Homo sapiens
cucaaguacguccggccugg

SEQ ID NO: 1285 - RNA, 20 nt, Homo sapiens
accaggccggacguacuuga

SEQ ID NO: 1286 - RNA, 20 nt, Homo sapiens
gaagugcgaggugaacggug

SEQ ID NO: 1287 - RNA, 20 nt, Homo sapiens
gguacuacuuaucgagaaug

SEQ ID NO: 1288 - RNA, 20 nt, Homo sapiens
ucccgcaggaaggcgaagag

SEQ ID NO: 1289 - RNA, 20 nt, Homo sapiens
uucgagaagugcgaggugaa

SEQ ID NO: 1290 - RNA, 20 nt, Homo sapiens
caccaggccggacguacuug

SEQ ID NO: 1291 - RNA, 20 nt, Homo sapiens
cgagaaggcauacaccgacu

SEQ ID NO: 1292 - RNA, 20 nt, Homo sapiens
gcucgaacccaccaccaggc

SEQ ID NO: 1293 - RNA, 20 nt, Homo sapiens
cccggaccguggugccucag

SEQ ID NO: 1294 - RNA, 20 nt, Homo sapiens
ugaauucccucaaguacguc

SEQ ID NO: 1295 - RNA, 20 nt, Homo sapiens
gagaauguggcgucccucug

SEQ ID NO: 1296 - RNA, 20 nt, Homo sapiens
ucccucaaguacguccggcc

SEQ ID NO: 1297 - RNA, 20 nt, Homo sapiens
acccucucuucgccuuccug

SEQ ID NO: 1298 - RNA, 20 nt, Homo sapiens
gugagccugggcucccugcg

SEQ ID NO: 1299 - RNA, 20 nt, Homo sapiens
ccggaccguggugccucaga

SEQ ID NO: 1300 - DNA, 20 bp, Homo sapiens
cccgcaggaaggcgaagaga

SEQ ID NO: 1301 - RNA, 20 nt, Homo sapiens
gaugcccaaacugguugcac

SEQ ID NO: 1302 - RNA, 20 nt, Homo sapiens
ggcgcaccugaugcccaaac

SEQ ID NO: 1303 - RNA, 20 nt, Homo sapiens
cccagaugaacgagcugcag

SEQ ID NO: 1304 - RNA, 20 nt, Homo sapiens
auucagaaucucuucguucu

SEQ ID NO: 1305 - RNA, 20 nt, Homo sapiens
ucggcgcgcccgcuggccgg

SEQ ID NO: 1306 - RNA, 20 nt, Homo sapiens
guagauuucaauacguuccg

SEQ ID NO: 1307 - RNA, 20 nt, Homo sapiens
gcucugaggcacaaccaccc

SEQ ID NO: 1308 - RNA, 20 nt, Homo sapiens
gauguccaaauugguugcaa

SEQ ID NO: 1309 - RNA, 20 nt, Homo sapiens
cucaaguauguccguccugg

SEQ ID NO: 1310 - RNA, 20 nt, Homo sapiens
uccuucagguaggcgaagac

SEQ ID NO: 1311 - RNA, 20 nt, Homo sapiens
gcugguauccacccccagga

SEQ ID NO: 1312 - RNA, 20 nt, Homo sapiens
cacccuuguccaaaaaugug

SEQ ID NO: 1313 - RNA, 20 nt, Homo sapiens
cuaggagaacugucagaaug

SEQ ID NO: 1314 - RNA, 20 nt, Homo sapiens
gagaauguggcuucgcucug

SEQ ID NO: 1315 - RNA, 20 nt, Homo sapiens
accaauuuggacaucaggug

SEQ ID NO: 1316 - RNA, 20 nt, Homo sapiens
agccacauucucaaucagca

SEQ ID NO: 1317 - RNA, 20 nt, Homo sapiens
ggccgugcugauugagaaug

SEQ ID NO: 1318 - RNA, 20 nt, Homo sapiens
gagcugggugaagucccggg

SEQ ID NO: 1319 - RNA, 20 nt, Homo sapiens
guccaaaaaugugaggugaa

SEQ ID NO: 1320 - RNA, 20 nt, Homo sapiens
uuucaauacguuccggggca

SEQ ID NO: 1321 - RNA, 20 nt, Homo sapiens
ucauucugacaguucuccua

SEQ ID NO: 1322 - RNA, 20 nt, Homo sapiens
ggacauacuugagacuguuc

SEQ ID NO: 1323 - RNA, 20 nt, Homo sapiens
agguagauuucaauacguuc

SEQ ID NO: 1324 - RNA, 20 nt, Homo sapiens
ggggagcuuguccuucaggu

SEQ ID NO: 1325 - RNA, 20 nt, Homo sapiens
uccugucuucgccuaccuga

SEQ ID NO: 1326 - RNA, 20 nt, Homo sapiens
cauccaggcugauggcacug

SEQ ID NO: 1327 - RNA, 20 nt, Homo sapiens
gcauugcagcucguugagcu

SEQ ID NO: 1328 - RNA, 20 nt, Homo sapiens
gguagauuucaauacguucc

SEQ ID NO: 1329 - RNA, 20 nt, Homo sapiens
cucauucugacaguucuccu

SEQ ID NO: 1330 - RNA, 20 nt, Homo sapiens
agcugcaaugccgcuuuccc

SEQ ID NO: 1331 - RNA, 20 nt, Homo sapiens
ccggggacaagagaagucga

SEQ ID NO: 1332 - RNA, 20 nt, Homo sapiens
gcugagugaguacucacuug

SEQ ID NO: 1333 - RNA, 20 nt, Homo sapiens
gugaguacucacuugagggu

SEQ ID NO: 1334 - RNA, 20 nt, Homo sapiens
cccagaaugaccagaccgaa

SEQ ID NO: 1335 - RNA, 20 nt, Homo sapiens
gugggcucuuaccaauguac

SEQ ID NO: 1336 - RNA, 20 nt, Homo sapiens
aacagguauguccgaccagg

SEQ ID NO: 1337 - RNA, 20 nt, Homo sapiens
auacguccucuuugucaacg

SEQ ID NO: 1338 - RNA, 20 nt, Homo sapiens
cggagcccucaccauugaug

SEQ ID NO: 1339 - RNA, 20 nt, Homo sapiens
aguggcaccauuuacgagua

SEQ ID NO: 1340 - RNA, 20 nt, Homo sapiens
uuccagauggacugccaugg

SEQ ID NO: 1341 - RNA, 20 nt, Homo sapiens
uggugccacuuaugccacca

SEQ ID NO: 1342 - RNA, 20 nt, Homo sapiens
agguauguccgaccaggugg

SEQ ID NO: 1343 - RNA, 20 nt, Homo sapiens
cucaacagguauguccgacc

SEQ ID NO: 1344 - RNA, 20 nt, Homo sapiens
caggaagagcuugcaccauu

SEQ ID NO: 1345 - RNA, 20 nt, Homo sapiens
ccuucgacuucucuuguccc

SEQ ID NO: 1346 - RNA, 20 nt, Homo sapiens
agagcuugcaccauucgguc

SEQ ID NO: 1347 - RNA, 20 nt, Homo sapiens
auccccuucaagcaguaugc

SEQ ID NO: 1348 - RNA, 20 nt, Homo sapiens
agcccucaccauugaugggg

SEQ ID NO: 1349 - RNA, 20 nt, Homo sapiens
ggacaaagccuccaccuggu

SEQ ID NO: 1350 - RNA, 20 nt, Homo sapiens
gccagcuacugaggccugac

SEQ ID NO: 1351 - RNA, 20 nt, Homo sapiens
guguuccagauggacugcca

SEQ ID NO: 1352 - RNA, 20 nt, Homo sapiens
agcuggccacguugacaaag

SEQ ID NO: 1353 - RNA, 20 nt, Homo sapiens
uuugagaaaggggaugucaa

SEQ ID NO: 1354 - RNA, 20 nt, Homo sapiens
caauuuggaaaacaggaacc

SEQ ID NO: 1355 - DNA, 20 bp, Homo sapiens
gacgaagccggccaggagca

SEQ ID NO: 1356 - RNA, 20 nt, Homo sapiens
gaauuugacguuguagcccg

SEQ ID NO: 1357 - RNA, 20 nt, Homo sapiens
uuaaccuggacaaguaccgg

SEQ ID NO: 1358 - RNA, 20 nt, Homo sapiens
gagaucaaagaguucgccgc

SEQ ID NO: 1359 - RNA, 20 nt, Homo sapiens
gcaaaccacacucagcguau

SEQ ID NO: 1360 - RNA, 20 nt, Homo sapiens
agagaucaaagaguucgccg

SEQ ID NO: 1361 - RNA, 20 nt, Homo sapiens
uucggucuugccucacuggg

SEQ ID NO: 1362 - RNA, 20 nt, Homo sapiens
cuuggcggaaaacucgugca

SEQ ID NO: 1363 - RNA, 20 nt, Homo sapiens
cgugugcaucgucaccaacg

SEQ ID NO: 1364 - RNA, 20 nt, Homo sapiens
gcuucccgaacugguuacac

SEQ ID NO: 1365 - RNA, 20 nt, Homo sapiens
uaaccuggacaaguaccggu

SEQ ID NO: 1366 - RNA, 20 nt, Homo sapiens
uuuccgccaaggacaucgac

SEQ ID NO: 1367 - RNA, 20 nt, Homo sapiens
cacgcccgauacgcugagug

SEQ ID NO: 1368 - RNA, 20 nt, Homo sapiens
gagcugaguguaguuuacuu

SEQ ID NO: 1369 - RNA, 20 nt, Homo sapiens
cgcacagcgccagucguccc

SEQ ID NO: 1370 - RNA, 20 nt, Homo sapiens
cccgaacugguuacacggga

SEQ ID NO: 1371 - RNA, 20 nt, Homo sapiens
gauacgcugagugugguuug

SEQ ID NO: 1372 - RNA, 20 nt, Homo sapiens
ccuuugccgccuacugaagc

SEQ ID NO: 1373 - RNA, 20 nt, Homo sapiens
guguaaccaguucgggaagc

SEQ ID NO: 1374 - RNA, 20 nt, Homo sapiens
caaggacaucgacgggcaca

SEQ ID NO: 1375 - RNA, 20 nt, Homo sapiens
gugcccgucgauguccuugg

SEQ ID NO: 1376 - RNA, 20 nt, Homo sapiens
aaccaguucgggaagcaggu

SEQ ID NO: 1377 - RNA, 20 nt, Homo sapiens
cgacgggcacaugguuaacc

SEQ ID NO: 1378 - RNA, 20 nt, Homo sapiens
cugaagccggcgcugcucug

SEQ ID NO: 1379 - RNA, 20 nt, Homo sapiens
caaaccacacucagcguauc

SEQ ID NO: 1380 - RNA, 20 nt, Homo sapiens
gcgcuagcucaccauggucc

SEQ ID NO: 1381 - RNA, 20 nt, Homo sapiens
uugcgcugucagaccacagu

SEQ ID NO: 1382 - RNA, 20 nt, Homo sapiens
gcccaacacaacuagaccau

SEQ ID NO: 1383 - RNA, 20 nt, Homo sapiens
cgcugucagaccacaguagg

SEQ ID NO: 1384 - RNA, 20 nt, Homo sapiens
ugcagguauguccguccagg

SEQ ID NO: 1385 - RNA, 20 nt, Homo sapiens
ugugcaaacaagucccaagc

SEQ ID NO: 1386 - RNA, 20 nt, Homo sapiens
gauugccacaaagacgagaa

SEQ ID NO: 1387 - RNA, 20 nt, Homo sapiens
uugcagguauguccguccag

SEQ ID NO: 1388 - RNA, 20 nt, Homo sapiens
agaacuaaaugcacuccagg

SEQ ID NO: 1389 - RNA, 20 nt, Homo sapiens
cccaacacaacuagaccaua

SEQ ID NO: 1390 - RNA, 20 nt, Homo sapiens
cuagguacaaauccuccccc

SEQ ID NO: 1391 - RNA, 20 nt, Homo sapiens
aggcaccaucuaugacuaug

SEQ ID NO: 1392 - RNA, 20 nt, Homo sapiens
gcacaaagcaggcuaggaga

SEQ ID NO: 1393 - RNA, 20 nt, Homo sapiens
uguuuccuucaagcaguaug

SEQ ID NO: 1394 - RNA, 20 nt, Homo sapiens
gcacauccucuucgucaacg

SEQ ID NO: 1395 - RNA, 20 nt, Homo sapiens
agguggccacguugacgaag

SEQ ID NO: 1396 - RNA, 20 nt, Homo sapiens
gaagacacguacuugagccc

SEQ ID NO: 1397 - RNA, 20 nt, Homo sapiens
gcccuauggucuaguugugu

SEQ ID NO: 1398 - RNA, 20 nt, Homo sapiens
uucauucuuauuaagugcga

SEQ ID NO: 1399 - RNA, 20 nt, Homo sapiens
auaacaaagagauucuuccu

SEQ ID NO: 1400 - RNA, 20 nt, Homo sapiens
caauuuggaaagcaagaacc

SEQ ID NO: 1401 - RNA, 20 nt, Homo sapiens
gggacuuguuugcacaaagc

SEQ ID NO: 1402 - RNA, 20 nt, Homo sapiens
guacaaauccucccccugga

SEQ ID NO: 1403 - RNA, 20 nt, Homo sapiens
uucucaaaaagcuggaaacu

SEQ ID NO: 1404 - RNA, 20 nt, Homo sapiens
ggucugacagcgcaauaucc

SEQ ID NO: 1405 - RNA, 20 nt, Homo sapiens
uuugagaaaggggaugugaa

SEQ ID NO: 1406 - RNA, 20 nt, Homo sapiens
uguggccgccuauugaggcu

SEQ ID NO: 1407 - RNA, 20 nt, Homo sapiens
uuccagguggauugcaacaa

SEQ ID NO: 1408 - RNA, 20 nt, Homo sapiens
agcugccaagccucaauagg

SEQ ID NO: 1409 - RNA, 20 nt, Homo sapiens
agaacugaaugcacuacagg

SEQ ID NO: 1410 - RNA, 20 nt, Homo sapiens
cuggggacaaagccacuacc

SEQ ID NO: 1411 - RNA, 20 nt, Homo sapiens
ccagguggauugcaacaaag

SEQ ID NO: 1412 - RNA, 20 nt, Homo sapiens
ggauguacuccucgccguug

SEQ ID NO: 1413 - RNA, 20 nt, Homo sapiens
gcacguccuguuugucaaug

SEQ ID NO: 1414 - RNA, 20 nt, Homo sapiens
agguauguguguccagguag

SEQ ID NO: 1415 - RNA, 20 nt, Homo sapiens
ucugcugagcaaagccaacc

SEQ ID NO: 1416 - RNA, 20 nt, Homo sapiens
gagggcuccauacucauaga

SEQ ID NO: 1417 - RNA, 20 nt, Homo sapiens
acaggcaccaucuaugagua

SEQ ID NO: 1418 - RNA, 20 nt, Homo sapiens
agcccucacccucaacggcg

SEQ ID NO: 1419 - RNA, 20 nt, Homo sapiens
acaaacucagaaauacuucu

SEQ ID NO: 1420 - RNA, 20 nt, Homo sapiens
uauggagcccucacccucaa

SEQ ID NO: 1421 - RNA, 20 nt, Homo sapiens
ggcuuggcagcucaguaucc

SEQ ID NO: 1422 - RNA, 20 nt, Homo sapiens
ccccuuuguugcaauccacc

SEQ ID NO: 1423 - RNA, 20 nt, Homo sapiens
ccuaaagccucaaaauagga

SEQ ID NO: 1424 - RNA, 20 nt, Homo sapiens
aggcggccacauugacaaac

SEQ ID NO: 1425 - RNA, 20 nt, Homo sapiens
gauguacuccucgccguuga

SEQ ID NO: 1426 - RNA, 20 nt, Homo sapiens
gucaauguggccgccuauug

SEQ ID NO: 1427 - RNA, 20 nt, Homo sapiens
cacugcagguaugugugucc

SEQ ID NO: 1428 - RNA, 20 nt, Homo sapiens
ugccugcaaacugcuugaau

SEQ ID NO: 1429 - RNA, 20 nt, Homo sapiens
aguauuucugaguuuguucc

SEQ ID NO: 1430 - RNA, 20 nt, Homo sapiens
uuugagaaaggggaugugaa

SEQ ID NO: 1431 - RNA, 20 nt, Homo sapiens
gugucgcuggagaaguaccg

SEQ ID NO: 1432 - RNA, 20 nt, Homo sapiens
cccgcgcacucaccgauccg

SEQ ID NO: 1433 - RNA, 20 nt, Homo sapiens
gcuggagaaguaccgcggau

SEQ ID NO: 1434 - RNA, 20 nt, Homo sapiens
uucaaggcggucaacauccg

SEQ ID NO: 1435 - RNA, 20 nt, Homo sapiens
cugcaaucuugcuaaacaug

SEQ ID NO: 1436 - RNA, 20 nt, Homo sapiens
gugaauguggccagcgagug

SEQ ID NO: 1437 - RNA, 20 nt, Homo sapiens
ggaaugagacacuguaggug

SEQ ID NO: 1438 - RNA, 20 nt, Homo sapiens
cgagcacguuaaaguggugg

SEQ ID NO: 1439 - RNA, 20 nt, Homo sapiens
acugcaaucuugcuaaacau

SEQ ID NO: 1440 - RNA, 20 nt, Homo sapiens
gcgagcacguuaaaguggug

SEQ ID NO: 1441 - RNA, 20 nt, Homo sapiens
acaggagccugacagcaaca

SEQ ID NO: 1442 - RNA, 20 nt, Homo sapiens
aagauugcagucaccgguac

SEQ ID NO: 1443 - RNA, 20 nt, Homo sapiens
ggaaggcgagcacguuaaag

SEQ ID NO: 1444 - RNA, 20 nt, Homo sapiens
ggacuucuacgacuucaagg

SEQ ID NO: 1445 - RNA, 20 nt, Homo sapiens
ccagcgacaccaguuugccc

SEQ ID NO: 1446 - RNA, 20 nt, Homo sapiens
ggcgagcacguuaaaguggu

SEQ ID NO: 1447 - RNA, 20 nt, Homo sapiens
guuggccaaacugguugcag

SEQ ID NO: 1448 - RNA, 20 nt, Homo sapiens
ugucauacaggugucccugg

SEQ ID NO: 1449 - RNA, 20 nt, Homo sapiens
gacugcaaucuugcuaaaca

SEQ ID NO: 1450 - RNA, 20 nt, Homo sapiens
aggcgagcacguuaaagugg

SEQ ID NO: 1451 - RNA, 20 nt, Homo sapiens
gcuggccacauucaccacca

SEQ ID NO: 1452 - RNA, 20 nt, Homo sapiens
uuuagcaagauugcagucac

SEQ ID NO: 1453 - DNA, 20 bp, Homo sapiens
gcgcgcaggccgcagcccac

SEQ ID NO: 1454 - RNA, 20 nt, Homo sapiens
gcugcagcugcugcagggcu

SEQ ID NO: 1455 - RNA, 20 nt, Homo sapiens
cuguuggccaaacugguugc

SEQ ID NO: 1456 - RNA, 20 nt, Homo sapiens
aaaagccaacacgcugaagu

SEQ ID NO: 1457 - RNA, 20 nt, Homo sapiens
gguuucacuaguuguaaacg

SEQ ID NO: 1458 - RNA, 20 nt, Homo sapiens
acugcaaauaccuuugcucu

SEQ ID NO: 1459 - RNA, 20 nt, Homo sapiens
ucuacuuccuugcuugggcg

SEQ ID NO: 1460 - RNA, 20 nt, Homo sapiens
uuugaagugaaggaugcaaa

SEQ ID NO: 1461 - RNA, 20 nt, Homo sapiens
ucacagacagaaauuacuua

SEQ ID NO: 1462 - RNA, 20 nt, Homo sapiens
gccaacacgcugaaguggga

SEQ ID NO: 1463 - RNA, 20 nt, Homo sapiens
aaggaacugcacaaagaguu

SEQ ID NO: 1464 - RNA, 20 nt, Homo sapiens
auguuccgggcccagagcaa

SEQ ID NO: 1465 - RNA, 20 nt, Homo sapiens
aaagauucuacuuccuugcu

SEQ ID NO: 1466 - RNA, 20 nt, Homo sapiens
cucacagacagaaauuacuu

SEQ ID NO: 1467 - RNA, 20 nt, Homo sapiens
gcuuacccgcuaaaauguuc

SEQ ID NO: 1468 - RNA, 20 nt, Homo sapiens
accaucccacuucagcgugu

SEQ ID NO: 1469 - RNA, 20 nt, Homo sapiens
ucuuaaucuuguggaagaug

SEQ ID NO: 1470 - RNA, 20 nt, Homo sapiens
gauucuccaaacugauugca

SEQ ID NO: 1471 - RNA, 20 nt, Homo sapiens
aaauaccuuugcucugggcc

SEQ ID NO: 1472 - RNA, 20 nt, Homo sapiens
aucggagccccgcccaagca

SEQ ID NO: 1473 - RNA, 20 nt, Homo sapiens
aacugcaaauaccuuugcuc

SEQ ID NO: 1474 - RNA, 20 nt, Homo sapiens
auucuacuuccuugcuuggg

SEQ ID NO: 1475 - RNA, 20 nt, Homo sapiens
cgauucuccaaacugauugc

SEQ ID NO: 1476 - RNA, 20 nt, Homo sapiens
guuucucuggaaaaguauaa

SEQ ID NO: 1477 - RNA, 20 nt, Homo sapiens
aucuuaaucuuguggaagau

SEQ ID NO: 1478 - RNA, 20 nt, Homo sapiens
gucugugaguuggcagucac

SEQ ID NO: 1479 - RNA, 20 nt, Homo sapiens
gaaaagccaacacgcugaag

SEQ ID NO: 1480 - RNA, 20 nt, Homo sapiens
cagaaauuacuuagggcuga

SEQ ID NO: 1481 - RNA, 20 nt, Homo sapiens
ggcauucaggcggcucacau

SEQ ID NO: 1482 - RNA, 20 nt, Homo sapiens
gggcuugggaucacucguga

SEQ ID NO: 1483 - RNA, 20 nt, Homo sapiens
ugggcgggucccgaauacca

SEQ ID NO: 1484 - RNA, 20 nt, Homo sapiens
uauuugccaauaggucaagg

SEQ ID NO: 1485 - RNA, 20 nt, Homo sapiens
ucccauauagaaaucauccg

SEQ ID NO: 1486 - RNA, 20 nt, Homo sapiens
cuaucaaaacaaucucacca

SEQ ID NO: 1487 - RNA, 20 nt, Homo sapiens
ugaucccaagcccacaauag

SEQ ID NO: 1488 - RNA, 20 nt, Homo sapiens
gguauucgggacccgcccaa

SEQ ID NO: 1489 - RNA, 20 nt, Homo sapiens
ugguuacugcaguucccggu

SEQ ID NO: 1490 - RNA, 20 nt, Homo sapiens
ccacacauccugaucgccac

SEQ ID NO: 1491 - RNA, 20 nt, Homo sapiens
gucaugacugguagccuacc

SEQ ID NO: 1492 - RNA, 20 nt, Homo sapiens
cacauccugaucgccacagg

SEQ ID NO: 1493 - RNA, 20 nt, Homo sapiens
aagcccacaauagaggucag

SEQ ID NO: 1494 - RNA, 20 nt, Homo sapiens
ucagugaugucuuagaaccc

SEQ ID NO: 1495 - RNA, 20 nt, Homo sapiens
gaucaccagguagucauagg

SEQ ID NO: 1496 - RNA, 20 nt, Homo sapiens
gugaggguaaauucaauugg

SEQ ID NO: 1497 - RNA, 20 nt, Homo sapiens
gaucaugcaugaauucagag

SEQ ID NO: 1498 - RNA, 20 nt, Homo sapiens
ucuggaaucauggucaugac

SEQ ID NO: 1499 - RNA, 20 nt, Homo sapiens
agcuuaggaauaaccagcga

SEQ ID NO: 1500 - RNA, 20 nt, Homo sapiens
ggggaucuggcucucaugag

SEQ ID NO: 1501 - RNA, 20 nt, Homo sapiens
ggucaugacugguagccuac

SEQ ID NO: 1502 - RNA, 20 nt, Homo sapiens
uauggcuuuccaaguuguga

SEQ ID NO: 1503 - RNA, 20 nt, Homo sapiens
agcccacaauagaggucagu

SEQ ID NO: 1504 - RNA, 20 nt, Homo sapiens
cuuguggcucuccaccacgg

SEQ ID NO: 1505 - RNA, 20 nt, Homo sapiens
acgggagagggcgcgcguga

SEQ ID NO: 1506 - RNA, 20 nt, Homo sapiens
aaguucugugagacaaccau

SEQ ID NO: 1507 - RNA, 20 nt, Homo sapiens
ucagccaucgccaagaucgu

SEQ ID NO: 1508 - RNA, 20 nt, Homo sapiens
uugacccacgggugaccaug

SEQ ID NO: 1509 - RNA, 20 nt, Homo sapiens
ccguaucacaguggugcaag

SEQ ID NO: 1510 - RNA, 20 nt, Homo sapiens
ugacccacgggugaccaugu

SEQ ID NO: 1511 - RNA, 20 nt, Homo sapiens
aauacccacauggucacccg

SEQ ID NO: 1512 - RNA, 20 nt, Homo sapiens
aucuugccgaugaacugaug

SEQ ID NO: 1513 - RNA, 20 nt, Homo sapiens
gccaucgccaagaucguggg

SEQ ID NO: 1514 - RNA, 20 nt, Homo sapiens
gaucuugccgaugaacugau

SEQ ID NO: 1515 - RNA, 20 nt, Homo sapiens
guggacacaguagagaucug

SEQ ID NO: 1516 - RNA, 20 nt, Homo sapiens
gcacaaguugcccccaaaug

SEQ ID NO: 1517 - RNA, 20 nt, Homo sapiens
accaaacuuccguaucacag

SEQ ID NO: 1518 - RNA, 20 nt, Homo sapiens
agcuggcacaguuugaccca

SEQ ID NO: 1519 - RNA, 20 nt, Homo sapiens
auacccacauggucacccgu

SEQ ID NO: 1520 - RNA, 20 nt, Homo sapiens
ucaagaauguaguggccgug

SEQ ID NO: 1521 - RNA, 20 nt, Homo sapiens
ccucuugcaccacugugaua

SEQ ID NO: 1522 - RNA, 20 nt, Homo sapiens
gauggggcaccacaaagauc

SEQ ID NO: 1523 - RNA, 20 nt, Homo sapiens
gggggccaacauugccagcg

SEQ ID NO: 1524 - RNA, 20 nt, Homo sapiens
agaugagcuucagcccauug

SEQ ID NO: 1525 - RNA, 20 nt, Homo sapiens
aagaucugugaccagcucaa

SEQ ID NO: 1526 - RNA, 20 nt, Homo sapiens
cuuuggcgacaacaccaagg

SEQ ID NO: 1527 - RNA, 20 nt, Homo sapiens
cccccaucagcacacucaug

SEQ ID NO: 1528 - RNA, 20 nt, Homo sapiens
gggcuuuggcgacaacacca

SEQ ID NO: 1529 - RNA, 20 nt, Homo sapiens
ggugaccauguggguauuug

SEQ ID NO: 1530 - RNA, 20 nt, Homo sapiens
auccccaugagugugcugau

SEQ ID NO: 1531 - RNA, 20 nt, Homo sapiens
gauuuggggucuguaacaag

SEQ ID NO: 1532 - RNA, 20 nt, Homo sapiens
caggacaacauaacgaugca

SEQ ID NO: 1533 - RNA, 20 nt, Homo sapiens
uggggucuguaacaagagga

SEQ ID NO: 1534 - RNA, 20 nt, Homo sapiens
agaguccgugaaaggucccg

SEQ ID NO: 1535 - RNA, 20 nt, Homo sapiens
agauaccuggcauaccugug

SEQ ID NO: 1536 - RNA, 20 nt, Homo sapiens
ugccacagccaauuacaugg

SEQ ID NO: 1537 - RNA, 20 nt, Homo sapiens
aaauguguuaucaaugccac

SEQ ID NO: 1538 - DNA, 20 bp, Homo sapiens
agaagacagacccccagaca

SEQ ID NO: 1539 - RNA, 20 nt, Homo sapiens
uaccuucaacaucacaacuc

SEQ ID NO: 1540 - RNA, 20 nt, Homo sapiens
agaagcacuaaauugaucca

SEQ ID NO: 1541 - RNA, 20 nt, Homo sapiens
aagugcgugugagcggcgca

SEQ ID NO: 1542 - RNA, 20 nt, Homo sapiens
caaauguguuaucaaugcca

SEQ ID NO: 1543 - RNA, 20 nt, Homo sapiens
uugcgcacagaguccgugaa

SEQ ID NO: 1544 - RNA, 20 nt, Homo sapiens
gcaggaccaaguagaacagu

SEQ ID NO: 1545 - RNA, 20 nt, Homo sapiens
caggaccaaguagaacaguu

SEQ ID NO: 1546 - RNA, 20 nt, Homo sapiens
acagggaaagugcgugugag

SEQ ID NO: 1547 - RNA, 20 nt, Homo sapiens
aguggccuuauuacuauagc

SEQ ID NO: 1548 - RNA, 20 nt, Homo sapiens
uggcaaaagaugacgaucgc

SEQ ID NO: 1549 - RNA, 20 nt, Homo sapiens
guuguugauaucagugagag

SEQ ID NO: 1550 - RNA, 20 nt, Homo sapiens
acugaguaucugcagauuug

SEQ ID NO: 1551 - RNA, 20 nt, Homo sapiens
uggugugagauaucugcaga

SEQ ID NO: 1552 - RNA, 20 nt, Homo sapiens
gacaauuaccuguaauaacc

SEQ ID NO: 1553 - RNA, 20 nt, Homo sapiens
auuccuaccagugagaagag

SEQ ID NO: 1554 - RNA, 20 nt, Homo sapiens
cauuucagaaccaguuaaca

SEQ ID NO: 1555 - RNA, 20 nt, Homo sapiens
caguuaccuuacuacugggu

SEQ ID NO: 1556 - RNA, 20 nt, Homo sapiens
ggcacaacaccacguuaucg

SEQ ID NO: 1557 - RNA, 20 nt, Homo sapiens
ucagcgcacgaucacugucg

SEQ ID NO: 1558 - RNA, 20 nt, Homo sapiens
gcagcaaaacgccuggauca

SEQ ID NO: 1559 - RNA, 20 nt, Homo sapiens
gcguguaggauggauaaggu

SEQ ID NO: 1560 - RNA, 20 nt, Homo sapiens
agucagcgcacgaucacugu

SEQ ID NO: 1561 - RNA, 20 nt, Homo sapiens
cacugucgggguguacgaag

SEQ ID NO: 1562 - RNA, 20 nt, Homo sapiens
cguguaggauggauaaggug

SEQ ID NO: 1563 - RNA, 20 nt, Homo sapiens
cugcucuuggagaccgacgc

SEQ ID NO: 1564 - RNA, 20 nt, Homo sapiens
ccacguuaucggggucgcug

SEQ ID NO: 1565 - RNA, 20 nt, Homo sapiens
ccccagcgaccccgauaacg

SEQ ID NO: 1566 - RNA, 20 nt, Homo sapiens
cuggagagcagaagaccgaa

SEQ ID NO: 1567 - RNA, 20 nt, Homo sapiens
gcccgcguguaggauggaua

SEQ ID NO: 1568 - RNA, 20 nt, Homo sapiens
agugaucgugcgcugacuca

SEQ ID NO: 1569 - RNA, 20 nt, Homo sapiens
accacguuaucggggucgcu

SEQ ID NO: 1570 - RNA, 20 nt, Homo sapiens
cguucucgcagcaaaacgcc

SEQ ID NO: 1571 - RNA, 20 nt, Homo sapiens
cgaggacgacgacagagaug

SEQ ID NO: 1572 - RNA, 20 nt, Homo sapiens
auccugcgcgucagcaaccc

SEQ ID NO: 1573 - RNA, 20 nt, Homo sapiens
ugcgcgucagcaacccgggc

SEQ ID NO: 1574 - RNA, 20 nt, Homo sapiens
cgcguguaggauggauaagg

SEQ ID NO: 1575 - RNA, 20 nt, Homo sapiens
caggcacaacaccacguuau

SEQ ID NO: 1576 - RNA, 20 nt, Homo sapiens
cauccugcgcgucagcaacc

SEQ ID NO: 1577 - RNA, 20 nt, Homo sapiens
cacuuacacguugagcagcu

SEQ ID NO: 1578 - RNA, 20 nt, Homo sapiens
uaaggugggggaugcccugg

SEQ ID NO: 1579 - RNA, 20 nt, Homo sapiens
acgccuggaucagggugaag

SEQ ID NO: 1580 - RNA, 20 nt, Homo sapiens
cagcgucggucuccaagagc

SEQ ID NO: 1581 - RNA, 20 nt, Homo sapiens
acaacgacaucaacaucgug

SEQ ID NO: 1582 - RNA, 20 nt, Homo sapiens
acucguacacccccacugug

SEQ ID NO: 1583 - RNA, 20 nt, Homo sapiens
gccaggaucgccucacagug

SEQ ID NO: 1584 - RNA, 20 nt, Homo sapiens
gaggcgauccuggcgcugag

SEQ ID NO: 1585 - RNA, 20 nt, Homo sapiens
ccuccucgucaauggccaag

SEQ ID NO: 1586 - RNA, 20 nt, Homo sapiens
cacaguggggguguacgagu

SEQ ID NO: 1587 - RNA, 20 nt, Homo sapiens
gcgccaggaucgccucacag

SEQ ID NO: 1588 - RNA, 20 nt, Homo sapiens
caccaaaagcuccuccaccg

SEQ ID NO: 1589 - RNA, 20 nt, Homo sapiens
caaaagcuccuccaccgcgg

SEQ ID NO: 1590 - RNA, 20 nt, Homo sapiens
gcucguggcgugcgacaacg

SEQ ID NO: 1591 - RNA, 20 nt, Homo sapiens
gacucacacauucaucaacu

SEQ ID NO: 1592 - RNA, 20 nt, Homo sapiens
ccaggaucgccucacagugg

SEQ ID NO: 1593 - RNA, 20 nt, Homo sapiens
gagcgugaaguggauuugca

SEQ ID NO: 1594 - RNA, 20 nt, Homo sapiens
ggcagaggaccacgcugucu

SEQ ID NO: 1595 - RNA, 20 nt, Homo sapiens
cccccacugugaggcgaucc

SEQ ID NO: 1596 - RNA, 20 nt, Homo sapiens
gaugucguugucacagcaga

SEQ ID NO: 1597 - RNA, 20 nt, Homo sapiens
aggacuggaugagcgugaag

SEQ ID NO: 1598 - RNA, 20 nt, Homo sapiens
caacgacaucaacaucgugc

SEQ ID NO: 1599 - RNA, 20 nt, Homo sapiens
caucaacaucgugcgggugu

SEQ ID NO: 1600 - RNA, 20 nt, Homo sapiens
aucaacaucgugcggguguc

SEQ ID NO: 1601 - RNA, 20 nt, Homo sapiens
gaugcagacggugaccgccg

SEQ ID NO: 1602 - RNA, 20 nt, Homo sapiens
ccucagggacccagacagcg

SEQ ID NO: 1603 - RNA, 20 nt, Homo sapiens
ugagcgugaaguggauuugc

SEQ ID NO: 1604 - RNA, 20 nt, Homo sapiens
gggucucggccggcucuccc

SEQ ID NO: 1605 - RNA, 20 nt, Homo sapiens
cguugucacagcagaaggac

SEQ ID NO: 1606 - RNA, 20 nt, Homo sapiens
uuuggcugacucguagacgc

SEQ ID NO: 1607 - RNA, 20 nt, Homo sapiens
gacaucgacauagugcgcgu

SEQ ID NO: 1608 - RNA, 20 nt, Homo sapiens
cacagaaggucacauugucg

SEQ ID NO: 1609 - RNA, 20 nt, Homo sapiens
acucguagacgccggcagug

SEQ ID NO: 1610 - RNA, 20 nt, Homo sapiens
uccggaaagcacagccaggu

SEQ ID NO: 1611 - RNA, 20 nt, Homo sapiens
cgacaucgacauagugcgcg

SEQ ID NO: 1612 - RNA, 20 nt, Homo sapiens
ugcgcgugggcgaugugcag

SEQ ID NO: 1613 - RNA, 20 nt, Homo sapiens
uuccggaaagcacagccagg

SEQ ID NO: 1614 - RNA, 20 nt, Homo sapiens
cacuuacacguucaagacuu

SEQ ID NO: 1615 - RNA, 20 nt, Homo sapiens
cagcggcuggcggcuaucgu

SEQ ID NO: 1616 - DNA, 20 bp, Homo sapiens
acccgcagccagcacacaga

SEQ ID NO: 1617 - RNA, 20 nt, Homo sapiens
gcugcgggugaggaggacga

SEQ ID NO: 1618 - RNA, 20 nt, Homo sapiens
cguucucgcagcagaaagcc

SEQ ID NO: 1619 - RNA, 20 nt, Homo sapiens
gcagcggcuggcggcuaucg

SEQ ID NO: 1620 - RNA, 20 nt, Homo sapiens
ccgcggccaggacacaguuc

SEQ ID NO: 1621 - RNA, 20 nt, Homo sapiens
acacagaaggucacauuguc

SEQ ID NO: 1622 - RNA, 20 nt, Homo sapiens
ugcuuuccggaacugugucc

SEQ ID NO: 1623 - RNA, 20 nt, Homo sapiens
gcugcaugaguugcugcugu

SEQ ID NO: 1624 - RNA, 20 nt, Homo sapiens
cugcugucggcgcagcguca

SEQ ID NO: 1625 - RNA, 20 nt, Homo sapiens
caguuccggaaagcacagcc

SEQ ID NO: 1626 - RNA, 20 nt, Homo sapiens
caacucaugcagcgcuuucc

SEQ ID NO: 1627 - RNA, 20 nt, Homo sapiens
uggcuccuccgcaggaugca

SEQ ID NO: 1628 - RNA, 20 nt, Homo sapiens
aagccuggaucagcguaaaa

SEQ ID NO: 1629 - RNA, 20 nt, Homo sapiens
ucccggcacccugcauccug

SEQ ID NO: 1630 - RNA, 20 nt, Homo sapiens
ugugcuggcugcgggugagg

SEQ ID NO: 1631 - RNA, 20 nt, Homo sapiens
ugguaucauauacgugaaug

SEQ ID NO: 1632 - RNA, 20 nt, Homo sapiens
acuaaaggacaagucaccac

SEQ ID NO: 1633 - RNA, 20 nt, Homo sapiens
aaguguacccuaacuagccg

SEQ ID NO: 1634 - RNA, 20 nt, Homo sapiens
aacaguaaccaaccucagug

SEQ ID NO: 1635 - RNA, 20 nt, Homo sapiens
uucacacauacaaugcacug

SEQ ID NO: 1636 - RNA, 20 nt, Homo sapiens
uaugugugaauuacguugug

SEQ ID NO: 1637 - RNA, 20 nt, Homo sapiens
uuguccuuuaguaaacacua

SEQ ID NO: 1638 - RNA, 20 nt, Homo sapiens
acuuugucuagugcuuccau

SEQ ID NO: 1639 - RNA, 20 nt, Homo sapiens
aagucaccacaggacaguac

SEQ ID NO: 1640 - RNA, 20 nt, Homo sapiens
acaguaaccaaccucagugu

SEQ ID NO: 1641 - RNA, 20 nt, Homo sapiens
agcaccaagcaggucauagg

SEQ ID NO: 1642 - RNA, 20 nt, Homo sapiens
uauggucaaugaauucaagu

SEQ ID NO: 1643 - RNA, 20 nt, Homo sapiens
acacugagguugguuacugu

SEQ ID NO: 1644 - RNA, 20 nt, Homo sapiens
acauaaaaacaauauucacu

SEQ ID NO: 1645 - RNA, 20 nt, Homo sapiens
agacaaaguucaccugaggu

SEQ ID NO: 1646 - RNA, 20 nt, Homo sapiens
ugaacauaaagucugcaaca

SEQ ID NO: 1647 - RNA, 20 nt, Homo sapiens
gggucagcacuacuucgaag

SEQ ID NO: 1648 - RNA, 20 nt, Homo sapiens
agaugcgaacucacauuaug

SEQ ID NO: 1649 - RNA, 20 nt, Homo sapiens
ugucuagugcuuccaucgga

SEQ ID NO: 1650 - RNA, 20 nt, Homo sapiens
aaccauaacaaaaccaucca

SEQ ID NO: 1651 - RNA, 20 nt, Homo sapiens
uggcuuuggcguuucagcgg

SEQ ID NO: 1652 - RNA, 20 nt, Homo sapiens
agauaugauugugucuccag

SEQ ID NO: 1653 - RNA, 20 nt, Homo sapiens
uacucauccaugugaccaug

SEQ ID NO: 1654 - RNA, 20 nt, Homo sapiens
uuuccucagucgacacagcc

SEQ ID NO: 1655 - RNA, 20 nt, Homo sapiens
cugaagauucaaccgguuua

SEQ ID NO: 1656 - RNA, 20 nt, Homo sapiens
auccagaccaugaucacaca

SEQ ID NO: 1657 - RNA, 20 nt, Homo sapiens
caaccucucguacaucggcg

SEQ ID NO: 1658 - RNA, 20 nt, Homo sapiens
uggagcccuguaccaacgug

SEQ ID NO: 1659 - RNA, 20 nt, Homo sapiens
cagaauauguggccacacgu

SEQ ID NO: 1660 - RNA, 20 nt, Homo sapiens
aaccucucguacaucggcga

SEQ ID NO: 1661 - RNA, 20 nt, Homo sapiens
cgcccucgccgauguacgag

SEQ ID NO: 1662 - RNA, 20 nt, Homo sapiens
ugcaaacagauauauaguac

SEQ ID NO: 1663 - RNA, 20 nt, Homo sapiens
ggugcagaacguuagcugaa

SEQ ID NO: 1664 - RNA, 20 nt, Homo sapiens
uacaccaaccucucguacau

SEQ ID NO: 1665 - RNA, 20 nt, Homo sapiens
aguaggucuggugcucaaag

SEQ ID NO: 1666 - RNA, 20 nt, Homo sapiens
uguggccacacguugguaca

SEQ ID NO: 1667 - RNA, 20 nt, Homo sapiens
ccuacugccagagaacccug

SEQ ID NO: 1668 - RNA, 20 nt, Homo sapiens
gccuacagaccaaauaucaa

SEQ ID NO: 1669 - RNA, 20 nt, Homo sapiens
auauauaguacaggaccuca

SEQ ID NO: 1670 - RNA, 20 nt, Homo sapiens
uguaaagaucuguuuccaug

SEQ ID NO: 1671 - RNA, 20 nt, Homo sapiens
uacgagagguugguguagcg

SEQ ID NO: 1672 - RNA, 20 nt, Homo sapiens
cauggucuggaucugcaaca

SEQ ID NO: 1673 - RNA, 20 nt, Homo sapiens
auggucuggaucugcaacac

SEQ ID NO: 1674 - RNA, 20 nt, Homo sapiens
gauccagaccaugaucacac

SEQ ID NO: 1675 - RNA, 20 nt, Homo sapiens
gcugaccuugagaucacagg

SEQ ID NO: 1676 - RNA, 20 nt, Homo sapiens
aggguuccugacagaauaug

SEQ ID NO: 1677 - RNA, 20 nt, Homo sapiens
cucgccgauguacgagaggu

SEQ ID NO: 1678 - RNA, 20 nt, Homo sapiens
uggucaagauaaugcuuccc

SEQ ID NO: 1679 - RNA, 20 nt, Homo sapiens
agcagauauggucauugcug

SEQ ID NO: 1680 - RNA, 20 nt, Homo sapiens
uucagacaugagaacaucau

SEQ ID NO: 1681 - RNA, 20 nt, Homo sapiens
gcugggagcgguaaaaccgg

SEQ ID NO: 1682 - RNA, 20 nt, Homo sapiens
gaauugcagaugaacaagcg

SEQ ID NO: 1683 - RNA, 20 nt, Homo sapiens
aauuguccggggucaaacag

SEQ ID NO: 1684 - RNA, 20 nt, Homo sapiens
ucacagauauaaagaaugac

SEQ ID NO: 1685 - RNA, 20 nt, Homo sapiens
cauucauauccgagcagcag

SEQ ID NO: 1686 - RNA, 20 nt, Homo sapiens
uauuucaguggaauuguccg

SEQ ID NO: 1687 - RNA, 20 nt, Homo sapiens
guggcuucagcauggaagug

SEQ ID NO: 1688 - RNA, 20 nt, Homo sapiens
guaggcgcccuaaguuugaa

SEQ ID NO: 1689 - RNA, 20 nt, Homo sapiens
guuugaagggcaucccccug

SEQ ID NO: 1690 - RNA, 20 nt, Homo sapiens
ugccgugaaucccuaagcca

SEQ ID NO: 1691 - RNA, 20 nt, Homo sapiens
aaacuuagggcgccuacagu

SEQ ID NO: 1692 - RNA, 20 nt, Homo sapiens
uauaaagaaugaccggugca

SEQ ID NO: 1693 - RNA, 20 nt, Homo sapiens
ccauucauauccgagcagca

SEQ ID NO: 1694 - RNA, 20 nt, Homo sapiens
aaagacucugcacacuugcg

SEQ ID NO: 1695 - RNA, 20 nt, Homo sapiens
agauaggcuggagagaaugg

SEQ ID NO: 1696 - RNA, 20 nt, Homo sapiens
cugcuauagcagaagccgac

SEQ ID NO: 1697 - RNA, 20 nt, Homo sapiens
ccaauugcuuucucagugug

SEQ ID NO: 1698 - RNA, 20 nt, Homo sapiens
caaacuuagggcgccuacag

SEQ ID NO: 1699 - RNA, 20 nt, Homo sapiens
uuggaaguggauccuugcac

SEQ ID NO: 1700 - RNA, 20 nt, Homo sapiens
gacagcagauugcgacacac

SEQ ID NO: 1701 - RNA, 20 nt, Homo sapiens
ugaaguuaccaugagaauca

SEQ ID NO: 1702 - DNA, 20 bp, Homo sapiens
agaagccgacaggccacaga

SEQ ID NO: 1703 - RNA, 20 nt, Homo sapiens
caaccgugauacucacccca

SEQ ID NO: 1704 - RNA, 20 nt, Homo sapiens
gcaauuccaaaacuuuggau

SEQ ID NO: 1705 - RNA, 20 nt, Homo sapiens
ccguagggcucuuaccucag

SEQ ID NO: 1706 - RNA, 20 nt, Homo sapiens
cacaugcauacaagaccaca

SEQ ID NO: 1707 - RNA, 20 nt, Homo sapiens
guugagguagcucucguuag

SEQ ID NO: 1708 - RNA, 20 nt, Homo sapiens
gaaaugcgccacgaugugga

SEQ ID NO: 1709 - RNA, 20 nt, Homo sapiens
ugaagaaaugcgccacgaug

SEQ ID NO: 1710 - RNA, 20 nt, Homo sapiens
ucacaugcauacaagaccac

SEQ ID NO: 1711 - RNA, 20 nt, Homo sapiens
ucugaugaacucaguugacg

SEQ ID NO: 1712 - RNA, 20 nt, Homo sapiens
uacauguggacagucaacac

SEQ ID NO: 1713 - RNA, 20 nt, Homo sapiens
ugccagaaaauugaggcacg

SEQ ID NO: 1714 - RNA, 20 nt, Homo sapiens
guaccagaacaacucauagg

SEQ ID NO: 1715 - RNA, 20 nt, Homo sapiens
acacaaccacugaauugcua

SEQ ID NO: 1716 - RNA, 20 nt, Homo sapiens
uguguaccagaacaacucau

SEQ ID NO: 1717 - RNA, 20 nt, Homo sapiens
gucaacugaguucaucagac

SEQ ID NO: 1718 - RNA, 20 nt, Homo sapiens
uauuguccuuagcaauucag

SEQ ID NO: 1719 - RNA, 20 nt, Homo sapiens
ccuggguucauucuuaccga

SEQ ID NO: 1720 - RNA, 20 nt, Homo sapiens
guuaaaauucaggcacagug

SEQ ID NO: 1721 - RNA, 20 nt, Homo sapiens
aggacaauagcaggcgucac

SEQ ID NO: 1722 - RNA, 20 nt, Homo sapiens
cuugccagaaaauugaggca

SEQ ID NO: 1723 - RNA, 20 nt, Homo sapiens
ucaaccuggaacgcuaccac

SEQ ID NO: 1724 - RNA, 20 nt, Homo sapiens
uauggacuuaccccguccca

SEQ ID NO: 1725 - RNA, 20 nt, Homo sapiens
ugugcagagagagacugucu

SEQ ID NO: 1726 - RNA, 20 nt, Homo sapiens
cuaccacuggagccaguccg

SEQ ID NO: 1727 - RNA, 20 nt, Homo sapiens
gugccacuccagcgaagaua

SEQ ID NO: 1728 - RNA, 20 nt, Homo sapiens
ugcauagcggucucuacaga

SEQ ID NO: 1729 - RNA, 20 nt, Homo sapiens
cuggacagcagcgcuacugg

SEQ ID NO: 1730 - RNA, 20 nt, Homo sapiens
uuguuacucuagugcugcag

SEQ ID NO: 1731 - RNA, 20 nt, Homo sapiens
accuucuugcuguauaacca

SEQ ID NO: 1732 - RNA, 20 nt, Homo sapiens
ugcagcaagauaccgagaug

SEQ ID NO: 1733 - RNA, 20 nt, Homo sapiens
augacucaugaccgaaauga

SEQ ID NO: 1734 - RNA, 20 nt, Homo sapiens
gcaagauaccgagaugaggu

SEQ ID NO: 1735 - RNA, 20 nt, Homo sapiens
agaacauuccauauuaccug

SEQ ID NO: 1736 - RNA, 20 nt, Homo sapiens
uaauucuguaggcgugcaug

SEQ ID NO: 1737 - RNA, 20 nt, Homo sapiens
aaucuucacaaauuugugcu

SEQ ID NO: 1738 - RNA, 20 nt, Homo sapiens
gagguuaagaacagaugcug

SEQ ID NO: 1739 - RNA, 20 nt, Homo sapiens
aauuuagauacccacccucc

SEQ ID NO: 1740 - RNA, 20 nt, Homo sapiens
acacucuuggcuuaccuccg

SEQ ID NO: 1741 - RNA, 20 nt, Homo sapiens
gccaagaguguucggcacau

SEQ ID NO: 1742 - RNA, 20 nt, Homo sapiens
uuaagacugaugcagccggg

SEQ ID NO: 1743 - RNA, 20 nt, Homo sapiens
uuaccuccgaggaucacaga

SEQ ID NO: 1744 - RNA, 20 nt, Homo sapiens
uggugacuggcuuauugcuc

SEQ ID NO: 1745 - RNA, 20 nt, Homo sapiens
uuaccuuauugcauauguag

SEQ ID NO: 1746 - RNA, 20 nt, Homo sapiens
agagaccacccaccucaucu

SEQ ID NO: 1747 - RNA, 20 nt, Homo sapiens
agcaagauaccgagaugagg

SEQ ID NO: 1748 - RNA, 20 nt, Homo sapiens
ccuucuugcuguauaaccaa

SEQ ID NO: 1749 - RNA, 20 nt, Homo sapiens
agaugucauggaaauccgaa

SEQ ID NO: 1750 - RNA, 20 nt, Homo sapiens
auguagaggcugugaucaug

SEQ ID NO: 1751 - RNA, 20 nt, Homo sapiens
aaagacuuuacagguauauc

SEQ ID NO: 1752 - RNA, 20 nt, Homo sapiens
cuaccuccaccagauguugg

SEQ ID NO: 1753 - RNA, 20 nt, Homo sapiens
uacuuacccccaacaucugg

SEQ ID NO: 1754 - RNA, 20 nt, Homo sapiens
acuaccuccaccagauguug

SEQ ID NO: 1755 - RNA, 20 nt, Homo sapiens
ucauccauuuacccucacaa

SEQ ID NO: 1756 - RNA, 20 nt, Homo sapiens
gcucuucgaaucggccgacg

SEQ ID NO: 1757 - RNA, 20 nt, Homo sapiens
gugagccacggugugcacga

SEQ ID NO: 1758 - RNA, 20 nt, Homo sapiens
ucagguucuccaugacuccg

SEQ ID NO: 1759 - RNA, 20 nt, Homo sapiens
ccacguagcccauaagcugg

SEQ ID NO: 1760 - RNA, 20 nt, Homo sapiens
gaugaggagaugagugaccu

SEQ ID NO: 1761 - RNA, 20 nt, Homo sapiens
ugaugcacacggcugccaug

SEQ ID NO: 1762 - RNA, 20 nt, Homo sapiens
cuaccacguagcccauaagc

SEQ ID NO: 1763 - RNA, 20 nt, Homo sapiens
aggucuauagugaaaaaaag

SEQ ID NO: 1764 - DNA, 20 bp, Homo sapiens
ggccgacgcggacggcaacg

SEQ ID NO: 1765 - RNA, 20 nt, Homo sapiens
gugccacucauagcgagcaa

SEQ ID NO: 1766 - RNA, 20 nt, Homo sapiens
ccaccauugcucgcuaugag

SEQ ID NO: 1767 - RNA, 20 nt, Homo sapiens
ccaccagcuuaugggcuacg

SEQ ID NO: 1768 - RNA, 20 nt, Homo sapiens
gcugucccucgugcacaccg

SEQ ID NO: 1769 - RNA, 20 nt, Homo sapiens
gcuggcucaaguccuaccac

SEQ ID NO: 1770 - RNA, 20 nt, Homo sapiens
aggaauuugaguuuguccau

SEQ ID NO: 1771 - RNA, 20 nt, Homo sapiens
cagcagagcgacaccugucg

SEQ ID NO: 1772 - RNA, 20 nt, Homo sapiens
uuaugggcuacgugguagug

SEQ ID NO: 1773 - RNA, 20 nt, Homo sapiens
ugaagcugcagucgaaguug

SEQ ID NO: 1774 - RNA, 20 nt, Homo sapiens
uaggacuugagccagccacg

SEQ ID NO: 1775 - RNA, 20 nt, Homo sapiens
cagagcgacaccugucgggg

SEQ ID NO: 1776 - RNA, 20 nt, Homo sapiens
gcaacuggggcaccucaaag

SEQ ID NO: 1777 - RNA, 20 nt, Homo sapiens
accuguccuaccuccucgug

SEQ ID NO: 1778 - RNA, 20 nt, Homo sapiens
agcagcucugcaugugaaag

SEQ ID NO: 1779 - RNA, 20 nt, Homo sapiens
agcagugcuccugagcagaa

SEQ ID NO: 1780 - RNA, 20 nt, Homo sapiens
gugguugugccaguaggcgc

SEQ ID NO: 1781 - RNA, 20 nt, Homo sapiens
acuuacacauaugaccaccu

SEQ ID NO: 1782 - RNA, 20 nt, Homo sapiens
uuaaugcuagaauucgaaag

SEQ ID NO: 1783 - RNA, 20 nt, Homo sapiens
uugauguccucaugcauacg

SEQ ID NO: 1784 - RNA, 20 nt, Homo sapiens
uuuagaggggaagcgugcug

SEQ ID NO: 1785 - RNA, 20 nt, Homo sapiens
aacaguggugccucaaaacg

SEQ ID NO: 1786 - RNA, 20 nt, Homo sapiens
ggaacgaccguccuccaagu

SEQ ID NO: 1787 - RNA, 20 nt, Homo sapiens
ggaagcuaaaaaaccaaugg

SEQ ID NO: 1788 - RNA, 20 nt, Homo sapiens
ggcccuuauaggcaguccag

SEQ ID NO: 1789 - RNA, 20 nt, Homo sapiens
cuuucaugauaacagaaucg

SEQ ID NO: 1790 - RNA, 20 nt, Homo sapiens
aguggaucucugauaaaacc

SEQ ID NO: 1791 - RNA, 20 nt, Homo sapiens
ggccgggcaguaaaggcaua

SEQ ID NO: 1792 - RNA, 20 nt, Homo sapiens
acaguggugccucaaaacgu

SEQ ID NO: 1793 - RNA, 20 nt, Homo sapiens
uuuaaccuauacuucuuggg

SEQ ID NO: 1794 - RNA, 20 nt, Homo sapiens
ugcgguuggaaguaauauug

SEQ ID NO: 1795 - RNA, 20 nt, Homo sapiens
uagagguuagggcaccuaca

SEQ ID NO: 1796 - RNA, 20 nt, Homo sapiens
ggcacaagcagcuacaaccu

SEQ ID NO: 1797 - RNA, 20 nt, Homo sapiens
gggcuuucucaauuucaaca

SEQ ID NO: 1798 - RNA, 20 nt, Homo sapiens
ucaaagacuuaccgagccaa

SEQ ID NO: 1799 - RNA, 20 nt, Homo sapiens
ugacaccuuaugcacugaag

SEQ ID NO: 1800 - RNA, 20 nt, Homo sapiens
gcugcauaaugacuuaaaag

SEQ ID NO: 1801 - RNA, 20 nt, Homo sapiens
ugugccaugccaguaaugaa

SEQ ID NO: 1802 - RNA, 20 nt, Homo sapiens
uguccuauuugugaccaggg

SEQ ID NO: 1803 - RNA, 20 nt, Homo sapiens
ccaugccaguaaugaagggu

SEQ ID NO: 1804 - RNA, 20 nt, Homo sapiens
gguggucauauguguaagug

SEQ ID NO: 1805 - RNA, 20 nt, Homo sapiens
guagaugauuugggaacaac

SEQ ID NO: 1806 - RNA, 20 nt, Homo sapiens
auccacagguucacuaacgg

SEQ ID NO: 1807 - RNA, 20 nt, Homo sapiens
cauccacagguucacuaacg

SEQ ID NO: 1808 - RNA, 20 nt, Homo sapiens
cagguucacuaacgggggca

SEQ ID NO: 1809 - RNA, 20 nt, Homo sapiens
ugcccccguuagugaaccug

SEQ ID NO: 1810 - RNA, 20 nt, Homo sapiens
acgcccaugacggagagucc

SEQ ID NO: 1811 - RNA, 20 nt, Homo sapiens
uggcuacugcguacauccac

SEQ ID NO: 1812 - RNA, 20 nt, Homo sapiens
uacauccacagguucacuaa

SEQ ID NO: 1813 - RNA, 20 nt, Homo sapiens
cgcccaugacggagaguccg

SEQ ID NO: 1814 - RNA, 20 nt, Homo sapiens
cuccccggacucuccgucau

SEQ ID NO: 1815 - RNA, 20 nt, Homo sapiens
augugguucgagauucuccc

SEQ ID NO: 1816 - RNA, 20 nt, Homo sapiens
gaaagagauaggcgcaucuc

SEQ ID NO: 1817 - RNA, 20 nt, Homo sapiens
caacaagcacacgcccauga

SEQ ID NO: 1818 - RNA, 20 nt, Homo sapiens
ugaucguuacuaugugucaa

SEQ ID NO: 1819 - RNA, 20 nt, Homo sapiens
ggagucugauggaaagagau

SEQ ID NO: 1820 - RNA, 20 nt, Homo sapiens
auguacgcaguagccagucc

SEQ ID NO: 1821 - RNA, 20 nt, Homo sapiens
uagguaacggggcagagaug

SEQ ID NO: 1822 - RNA, 20 nt, Homo sapiens
gaaaaaaggguugcucauuu

SEQ ID NO: 1823 - RNA, 20 nt, Homo sapiens
cacgcccaugacggagaguc

SEQ ID NO: 1824 - RNA, 20 nt, Homo sapiens
acauccacagguucacuaac

SEQ ID NO: 1825 - RNA, 20 nt, Homo sapiens
gugcuuguugauuccaggac

SEQ ID NO: 1826 - RNA, 20 nt, Homo sapiens
uggguaucacuggagucuga

SEQ ID NO: 1827 - RNA, 20 nt, Homo sapiens
gguuuggagaacauugauua

SEQ ID NO: 1828 - RNA, 20 nt, Homo sapiens
cucuuauuugaaggaaaaaa

SEQ ID NO: 1829 - RNA, 20 nt, Homo sapiens
ggcgugugcuuguugauucc

SEQ ID NO: 1830 - RNA, 20 nt, Homo sapiens
acuggaagcacgaaugacag

SEQ ID NO: 1831 - RNA, 20 nt, Homo sapiens
uugucuaugaacaucugugg

SEQ ID NO: 1832 - RNA, 20 nt, Homo sapiens
ccuggugggaaaacacugug

SEQ ID NO: 1833 - RNA, 20 nt, Homo sapiens
aaguaggaaauccauagugu

SEQ ID NO: 1834 - RNA, 20 nt, Homo sapiens
ggcaccagguaguccaccau

SEQ ID NO: 1835 - RNA, 20 nt, Homo sapiens
uagauggcgucugauaccac

SEQ ID NO: 1836 - RNA, 20 nt, Homo sapiens
uuucaaguuggaugcauugg

SEQ ID NO: 1837 - RNA, 20 nt, Homo sapiens
gaacuacuaaaucuaaugcu

SEQ ID NO: 1838 - RNA, 20 nt, Homo sapiens
aggcuaugcagcuugcaaag

SEQ ID NO: 1839 - RNA, 20 nt, Homo sapiens
gaccucaccauucccaacgg

SEQ ID NO: 1840 - RNA, 20 nt, Homo sapiens
cuugucuaugaacaucugug

SEQ ID NO: 1841 - RNA, 20 nt, Homo sapiens
agugaccucaccauucccaa

SEQ ID NO: 1842 - RNA, 20 nt, Homo sapiens
cacaaacuuacuuugaccug

SEQ ID NO: 1843 - RNA, 20 nt, Homo sapiens
ugugaaggcccaucccaugg

SEQ ID NO: 1844 - RNA, 20 nt, Homo sapiens
gggcuccugaucuugcucug

SEQ ID NO: 1845 - RNA, 20 nt, Homo sapiens
caaggagauggaccucagcg

SEQ ID NO: 1846 - RNA, 20 nt, Homo sapiens
gcauagccuucucuagaaag

SEQ ID NO: 1847 - RNA, 20 nt, Homo sapiens
auggauuuccuacuuauggu

SEQ ID NO: 1848 - RNA, 20 nt, Homo sapiens
gaaucuaaaaaggacccuga

SEQ ID NO: 1849 - RNA, 20 nt, Homo sapiens
uauggauuuccuacuuaugg

SEQ ID NO: 1850 - RNA, 20 nt, Homo sapiens
cuugcaaauaggcaagguca

SEQ ID NO: 1851 - RNA, 20 nt, Homo sapiens
uuucaauaacuuucccaaag

SEQ ID NO: 1852 - RNA, 20 nt, Homo sapiens
gcaaaacagaguuacccaag

SEQ ID NO: 1853 - RNA, 20 nt, Homo sapiens
cagauaaagaagaagugcag

SEQ ID NO: 1854 - RNA, 20 nt, Homo sapiens
ccuucauucucaacuuguga

SEQ ID NO: 1855 - RNA, 20 nt, Homo sapiens
ggacgagaacggagacacgu

SEQ ID NO: 1856 - RNA, 20 nt, Homo sapiens
acucgacuacggcgucaccg

SEQ ID NO: 1857 - RNA, 20 nt, Homo sapiens
ccacuccauagaaucuccgg

SEQ ID NO: 1858 - RNA, 20 nt, Homo sapiens
gcccgagcccuacucgacua

SEQ ID NO: 1859 - RNA, 20 nt, Homo sapiens
cgagggaccagccaagaucg

SEQ ID NO: 1860 - RNA, 20 nt, Homo sapiens
guucaccuauuacccucugg

SEQ ID NO: 1861 - RNA, 20 nt, Homo sapiens
ugauggaucugaguauagug

SEQ ID NO: 1862 - RNA, 20 nt, Homo sapiens
gggaccagccaagaucgagg

SEQ ID NO: 1863 - RNA, 20 nt, Homo sapiens
cccacuccauagaaucuccg

SEQ ID NO: 1864 - RNA, 20 nt, Homo sapiens
cugcaacugaaacgcaagcg

SEQ ID NO: 1865 - RNA, 20 nt, Homo sapiens
ggaucugcgccguuucugug

SEQ ID NO: 1866 - RNA, 20 nt, Homo sapiens
cuccuagaucuguaacuacg

SEQ ID NO: 1867 - RNA, 20 nt, Homo sapiens
gaucacggggcagacgagug

SEQ ID NO: 1868 - RNA, 20 nt, Homo sapiens
uggugagguugacaacgccg

SEQ ID NO: 1869 - RNA, 20 nt, Homo sapiens
uccuagaucuguaacuacga

SEQ ID NO: 1870 - RNA, 20 nt, Homo sapiens
caacugaaacgcaagcgagg

SEQ ID NO: 1871 - RNA, 20 nt, Homo sapiens
uagucacaugcaggacaccc

SEQ ID NO: 1872 - RNA, 20 nt, Homo sapiens
ccccugcacccauacccgua

SEQ ID NO: 1873 - RNA, 20 nt, Homo sapiens
acugcccagaggccgagcag

SEQ ID NO: 1874 - RNA, 20 nt, Homo sapiens
cauugagguucgguucuaug

SEQ ID NO: 1875 - RNA, 20 nt, Homo sapiens
acaguucaccuauuacccuc

SEQ ID NO: 1876 - RNA, 20 nt, Homo sapiens
cccagagccuccacccaugu

SEQ ID NO: 1877 - RNA, 20 nt, Homo sapiens
cagccccuaccaguccggcg

SEQ ID NO: 1878 - RNA, 20 nt, Homo sapiens
gaauggauggcaggccuuug

SEQ ID NO: 1879 - RNA, 20 nt, Homo sapiens
accucgcugcagcaucuccg

SEQ ID NO: 1880 - RNA, 20 nt, Homo sapiens
ugggcgaagagucuccucug

SEQ ID NO: 1881 - RNA, 20 nt, Homo sapiens
gaggagaaucaagagcuccg

SEQ ID NO: 1882 - RNA, 20 nt, Homo sapiens
agcauggcuggcuuccccag

SEQ ID NO: 1883 - RNA, 20 nt, Homo sapiens
gaaucaagagcuccgaggug

SEQ ID NO: 1884 - RNA, 20 nt, Homo sapiens
cugggcgaagagucuccucu

SEQ ID NO: 1885 - RNA, 20 nt, Homo sapiens
ucuuccagcugcauucccua

SEQ ID NO: 1886 - RNA, 20 nt, Homo sapiens
gacccuccagcgcugccugg

SEQ ID NO: 1887 - RNA, 20 nt, Homo sapiens
gacucacuucuccuccgagg

SEQ ID NO: 1888 - RNA, 20 nt, Homo sapiens
ccaggugacguccuugcucg

SEQ ID NO: 1889 - RNA, 20 nt, Homo sapiens
cugcaccugccuucagaaca

SEQ ID NO: 1890 - RNA, 20 nt, Homo sapiens
cgucaccugggcuuucacag

SEQ ID NO: 1891 - RNA, 20 nt, Homo sapiens
gcagcagaucaggacguacu

SEQ ID NO: 1892 - RNA, 20 nt, Homo sapiens
ggcagagcaaccagauucug

SEQ ID NO: 1893 - RNA, 20 nt, Homo sapiens
cccgagcaaggacgucaccu

SEQ ID NO: 1894 - RNA, 20 nt, Homo sapiens
uggagaagcucgaucugaag

SEQ ID NO: 1895 - RNA, 20 nt, Homo sapiens
cacaucaagagcagcguggu

SEQ ID NO: 1896 - RNA, 20 nt, Homo sapiens
caaccacaucaagagcagcg

SEQ ID NO: 1897 - RNA, 20 nt, Homo sapiens
gcugacucacuucuccuccg

SEQ ID NO: 1898 - RNA, 20 nt, Homo sapiens
aggaaacugguggagagacu

SEQ ID NO: 1899 - RNA, 20 nt, Homo sapiens
gagcgcccuguucugaaggc

SEQ ID NO: 1900 - RNA, 20 nt, Homo sapiens
guggaccagcugcgcaugca

SEQ ID NO: 1901 - RNA, 20 nt, Homo sapiens
ugcauuuccaagccagccag

SEQ ID NO: 1902 - RNA, 20 nt, Homo sapiens
ccacaucaagagcagcgugg

SEQ ID NO: 1903 - RNA, 20 nt, Homo sapiens
aaugccaggcucuggagggu

SEQ ID NO: 1904 - RNA, 20 nt, Homo sapiens
gcagcagcagcacagcgugc

SEQ ID NO: 1905 - RNA, 20 nt, Homo sapiens
uuugucaauaagcccacgcg

SEQ ID NO: 1906 - RNA, 20 nt, Homo sapiens
aguacuauaaugacuucccg

SEQ ID NO: 1907 - RNA, 20 nt, Homo sapiens
ccagggcacgcauugacugg

SEQ ID NO: 1908 - RNA, 20 nt, Homo sapiens
gcuuugucaauaagcccacg

SEQ ID NO: 1909 - RNA, 20 nt, Homo sapiens
uuaccaauguagcucccaag

SEQ ID NO: 1910 - RNA, 20 nt, Homo sapiens
gcuuauugacaaagcucccg

SEQ ID NO: 1911 - RNA, 20 nt, Homo sapiens
acauucuggagugucccgaa

SEQ ID NO: 1912 - RNA, 20 nt, Homo sapiens
ucuaucucauuugcauccgg

SEQ ID NO: 1913 - RNA, 20 nt, Homo sapiens
cuuugucaauaagcccacgc

SEQ ID NO: 1914 - RNA, 20 nt, Homo sapiens
cuucgggacacuccagaaug

SEQ ID NO: 1915 - RNA, 20 nt, Homo sapiens
cccugugaaucagagaggug

SEQ ID NO: 1916 - RNA, 20 nt, Homo sapiens
caaaugagauagauugcaug

SEQ ID NO: 1917 - RNA, 20 nt, Homo sapiens
uuaguacauggguugugugg

SEQ ID NO: 1918 - RNA, 20 nt, Homo sapiens
uuguuugaagcgcaacucga

SEQ ID NO: 1919 - RNA, 20 nt, Homo sapiens
uauugacaaagcucccgugg

SEQ ID NO: 1920 - RNA, 20 nt, Homo sapiens
uucacucacccgaaccaagu

SEQ ID NO: 1921 - RNA, 20 nt, Homo sapiens
caguacuauaaugacuuccc

SEQ ID NO: 1922 - RNA, 20 nt, Homo sapiens
gugcuaagggggcgacaagg

SEQ ID NO: 1923 - RNA, 20 nt, Homo sapiens
caucccaacgacaaagucau

SEQ ID NO: 1924 - RNA, 20 nt, Homo sapiens
augagauagauugcaugugg

SEQ ID NO: 1925 - RNA, 20 nt, Homo sapiens
cgggugcuaagggggcgaca

SEQ ID NO: 1926 - RNA, 20 nt, Homo sapiens
aaagacccugugaaucagag

SEQ ID NO: 1927 - RNA, 20 nt, Homo sapiens
ugcgcuucaaacaauaccuc

SEQ ID NO: 1928 - RNA, 20 nt, Homo sapiens
caucaaagccagccauccug

SEQ ID NO: 1929 - RNA, 20 nt, Homo sapiens
cccuucauaccuggacaggg

SEQ ID NO: 1930 - RNA, 20 nt, Homo sapiens
uucauccacaaacccgcgca

SEQ ID NO: 1931 - RNA, 20 nt, Homo sapiens
auuacuacaacagcaucccg

SEQ ID NO: 1932 - RNA, 20 nt, Homo sapiens
ggggccgcgaacuuccacug

SEQ ID NO: 1933 - RNA, 20 nt, Homo sapiens
ccaggacaugacggauuacg

SEQ ID NO: 1934 - RNA, 20 nt, Homo sapiens
ccugacgcgaaggagaugga

SEQ ID NO: 1935 - RNA, 20 nt, Homo sapiens
aaugccgcaguggaaguucg

SEQ ID NO: 1936 - RNA, 20 nt, Homo sapiens
uuacguggccuacgucgcca

SEQ ID NO: 1937 - RNA, 20 nt, Homo sapiens
agccaucaaccggcuccaug

SEQ ID NO: 1938 - RNA, 20 nt, Homo sapiens
gggacucacccgcacgacgu

SEQ ID NO: 1939 - RNA, 20 nt, Homo sapiens
cuggcuacaccccgacgcca

SEQ ID NO: 1940 - RNA, 20 nt, Homo sapiens
uccaucuccuucgcgucagg

SEQ ID NO: 1941 - RNA, 20 nt, Homo sapiens
ucgaugcagcccauguacug

SEQ ID NO: 1942 - RNA, 20 nt, Homo sapiens
ggacuuuaacacgcgcacgc

SEQ ID NO: 1943 - RNA, 20 nt, Homo sapiens
cgugcgcguguuaaagucca

SEQ ID NO: 1944 - RNA, 20 nt, Homo sapiens
gaugggguccuuggcgacgu

SEQ ID NO: 1945 - RNA, 20 nt, Homo sapiens
acguaauccgucauguccug

SEQ ID NO: 1946 - RNA, 20 nt, Homo sapiens
gcugcccuuccggauccacu

SEQ ID NO: 1947 - RNA, 20 nt, Homo sapiens
gggguguagccagccgugcg

SEQ ID NO: 1948 - RNA, 20 nt, Homo sapiens
gccgccgaguggauccggaa

SEQ ID NO: 1949 - RNA, 20 nt, Homo sapiens
caauuacuacaacagcaucc

SEQ ID NO: 1950 - RNA, 20 nt, Homo sapiens
cagagcaucaucagcaccgu

SEQ ID NO: 1951 - RNA, 20 nt, Homo sapiens
guggauggagaugcucaugc

SEQ ID NO: 1952 - DNA, 20 bp, Homo sapiens
gcgaccccgcgccccgacag

SEQ ID NO: 1953 - RNA, 20 nt, Homo sapiens
caucucuuagagaaggagau

SEQ ID NO: 1954 - DNA, 20 bp, Homo sapiens
cgcggacccccaacccgagc

SEQ ID NO: 1955 - RNA, 20 nt, Homo sapiens
ucauagcgaaucaccacaug

SEQ ID NO: 1956 - RNA, 20 nt, Homo sapiens
auuccaaaaugugacaagcu

SEQ ID NO: 1957 - RNA, 20 nt, Homo sapiens
aaagagcagacuuauuacca

SEQ ID NO: 1958 - RNA, 20 nt, Homo sapiens
acucaccgaucauggagagc

SEQ ID NO: 1959 - RNA, 20 nt, Homo sapiens
uugaaguucugcgcucaaug

SEQ ID NO: 1960 - RNA, 20 nt, Homo sapiens
gcuuaccucugcgauuaaca

SEQ ID NO: 1961 - RNA, 20 nt, Homo sapiens
uugaccacguaggugacucc

SEQ ID NO: 1962 - RNA, 20 nt, Homo sapiens
cgaaggagauggaccgcaug

SEQ ID NO: 1963 - RNA, 20 nt, Homo sapiens
uauuaccagggaagacacuu

SEQ ID NO: 1964 - RNA, 20 nt, Homo sapiens
cagucugaaccugcgaacuc

SEQ ID NO: 1965 - RNA, 20 nt, Homo sapiens
gagcucaaaggcuuguccga

SEQ ID NO: 1966 - RNA, 20 nt, Homo sapiens
uugcuuaaaccggagcucaa

SEQ ID NO: 1967 - RNA, 20 nt, Homo sapiens
ugcucauucccgcaaacugg

SEQ ID NO: 1968 - RNA, 20 nt, Homo sapiens
cgcacccaccuugaccacgu

SEQ ID NO: 1969 - RNA, 20 nt, Homo sapiens
ucccuacuugguguccggcg

SEQ ID NO: 1970 - RNA, 20 nt, Homo sapiens
ugggcugugucaggagcaug

SEQ ID NO: 1971 - RNA, 20 nt, Homo sapiens
guaucaagaaagcccccugg

SEQ ID NO: 1972 - RNA, 20 nt, Homo sapiens
cgccucgccggacaccaagu

SEQ ID NO: 1973 - RNA, 20 nt, Homo sapiens
cggaguucgcagguucagac

SEQ ID NO: 1974 - RNA, 20 nt, Homo sapiens
ggggcccggagucaccuacg

SEQ ID NO: 1975 - RNA, 20 nt, Homo sapiens
ggaugcuguuguaguauggg

SEQ ID NO: 1976 - RNA, 20 nt, Homo sapiens
gggcgcacugccguccgggg

SEQ ID NO: 1977 - RNA, 20 nt, Homo sapiens
cauuccaaaaugugacaagc

SEQ ID NO: 1978 - RNA, 20 nt, Homo sapiens
ccgcugcccaggcccccucg

SEQ ID NO: 1979 - RNA, 20 nt, Homo sapiens
ccuggaggaggcaucuugcu

SEQ ID NO: 1980 - RNA, 20 nt, Homo sapiens
acuuacaggauccccuccag

SEQ ID NO: 1981 - RNA, 20 nt, Homo sapiens
aaagauccaguuaaucaacg

SEQ ID NO: 1982 - RNA, 20 nt, Homo sapiens
uccggagcuaccuucgucca

SEQ ID NO: 1983 - RNA, 20 nt, Homo sapiens
gcacgaaucagggguuaggg

SEQ ID NO: 1984 - RNA, 20 nt, Homo sapiens
guugauaggaacuuaacugg

SEQ ID NO: 1985 - RNA, 20 nt, Homo sapiens
cacauauuggaaugccacaa

SEQ ID NO: 1986 - RNA, 20 nt, Homo sapiens
gcauauugauagccaugccg

SEQ ID NO: 1987 - RNA, 20 nt, Homo sapiens
ugaucgacucguuccgaaag

SEQ ID NO: 1988 - RNA, 20 nt, Homo sapiens
gggcaugaacuacuguguga

SEQ ID NO: 1989 - RNA, 20 nt, Homo sapiens
ucugaaacaccaccuacugg

SEQ ID NO: 1990 - RNA, 20 nt, Homo sapiens
guggcauuccaauaugugac

SEQ ID NO: 1991 - RNA, 20 nt, Homo sapiens
aacuggaucuuuagcuacgu

SEQ ID NO: 1992 - RNA, 20 nt, Homo sapiens
cgucuugggccauuccauug

SEQ ID NO: 1993 - RNA, 20 nt, Homo sapiens
gaguucaaaagccugcccua

SEQ ID NO: 1994 - RNA, 20 nt, Homo sapiens
aggaagcgggcacgaaucag

SEQ ID NO: 1995 - RNA, 20 nt, Homo sapiens
gaggcaccucuuugguaccc

SEQ ID NO: 1996 - RNA, 20 nt, Homo sapiens
gcggaucaaaguucaagcca

SEQ ID NO: 1997 - RNA, 20 nt, Homo sapiens
gccaacacuuaggagcaggc

SEQ ID NO: 1998 - RNA, 20 nt, Homo sapiens
cgucauaaguaccauagggc

SEQ ID NO: 1999 - RNA, 20 nt, Homo sapiens
aagacgucauaaguaccaua

SEQ ID NO: 2000 - RNA, 20 nt, Homo sapiens
caagacgucauaaguaccau

SEQ ID NO: 2001 - RNA, 20 nt, Homo sapiens
gggggaucaaggugcacagu

SEQ ID NO: 2002 - RNA, 20 nt, Homo sapiens
uccuuggacgaagguagcuc

SEQ ID NO: 2003 - RNA, 20 nt, Homo sapiens
gcaguaagccauuuguuccg

SEQ ID NO: 2004 - RNA, 20 nt, Homo sapiens
gcucuccugcgacggcaagg

SEQ ID NO: 2005 - RNA, 20 nt, Homo sapiens
acacugccgagggcaccagg

SEQ ID NO: 2006 - RNA, 20 nt, Homo sapiens
ggcgggcggucccacccagg

SEQ ID NO: 2007 - RNA, 20 nt, Homo sapiens
ugcuccgccagcgagagcga

SEQ ID NO: 2008 - RNA, 20 nt, Homo sapiens
caggcccucuacgggcuccg

SEQ ID NO: 2009 - RNA, 20 nt, Homo sapiens
gccagcgagagcgagggcug

SEQ ID NO: 2010 - DNA, 20 bp, Homo sapiens
ccagcgggaaccccccaggg

SEQ ID NO: 2011 - RNA, 20 nt, Homo sapiens
gugcccucggcaguguccug

SEQ ID NO: 2012 - RNA, 20 nt, Homo sapiens
aggccgcaggacacugccga

SEQ ID NO: 2013 - RNA, 20 nt, Homo sapiens
cuccuccccgcggacucccg

SEQ ID NO: 2014 - RNA, 20 nt, Homo sapiens
cagcuccccggagcccguag

SEQ ID NO: 2015 - RNA, 20 nt, Homo sapiens
ucuggcgggcggucccaccc

SEQ ID NO: 2016 - RNA, 20 nt, Homo sapiens
gaggccgcaggacacugccg

SEQ ID NO: 2017 - RNA, 20 nt, Homo sapiens
aggacacugccgagggcacc

SEQ ID NO: 2018 - DNA, 20 bp, Homo sapiens
aggccagcgggaacccccca

SEQ ID NO: 2019 - RNA, 20 nt, Homo sapiens
agcuccccggagcccguaga

SEQ ID NO: 2020 - RNA, 20 nt, Homo sapiens
ucagcccucgcucucgcugg

SEQ ID NO: 2021 - DNA, 20 bp, Homo sapiens
gagggcaccaggcggccgag

SEQ ID NO: 2022 - RNA, 20 nt, Homo sapiens
gccgucaccgccgcccuggg

SEQ ID NO: 2023 - RNA, 20 nt, Homo sapiens
ggggcgcagagguaggcagc

SEQ ID NO: 2024 - RNA, 20 nt, Homo sapiens
uccucagcccucgcucucgc

SEQ ID NO: 2025 - RNA, 20 nt, Homo sapiens
uccugcggccucugcgagcc

SEQ ID NO: 2026 - RNA, 20 nt, Homo sapiens
ggcacucaccguccgggcgc

SEQ ID NO: 2027 - RNA, 20 nt, Homo sapiens
gccaggcccucuacgggcuc

SEQ ID NO: 2028 - RNA, 20 nt, Homo sapiens
ccguccgggcgcgggccucg

SEQ ID NO: 2029 - RNA, 20 nt, Homo sapiens
gccagagcccccggggcgcu

SEQ ID NO: 2030 - RNA, 20 nt, Homo sapiens
gcaauuuggguagaauuucg

SEQ ID NO: 2031 - RNA, 20 nt, Homo sapiens
guucgaacagguaucuacca

SEQ ID NO: 2032 - RNA, 20 nt, Homo sapiens
gugcacuauuuauaacccaa

SEQ ID NO: 2033 - RNA, 20 nt, Homo sapiens
accauaucaaauucacacac

SEQ ID NO: 2034 - RNA, 20 nt, Homo sapiens
gaagcuguauaaugcuuggg

SEQ ID NO: 2035 - RNA, 20 nt, Homo sapiens
cucuacuaugaggugaauug

SEQ ID NO: 2036 - RNA, 20 nt, Homo sapiens
acagcuacaccauauaugaa

SEQ ID NO: 2037 - RNA, 20 nt, Homo sapiens
uugccuuaccaguccugcgu

SEQ ID NO: 2038 - RNA, 20 nt, Homo sapiens
uguuauagggcaaauaauag

SEQ ID NO: 2039 - RNA, 20 nt, Homo sapiens
acauacauugcucuacuaug

SEQ ID NO: 2040 - RNA, 20 nt, Homo sapiens
acagcaaaaccucgaaccau

SEQ ID NO: 2041 - RNA, 20 nt, Homo sapiens
aaccucgaaccauaggaucu

SEQ ID NO: 2042 - RNA, 20 nt, Homo sapiens
aaauauucgagacauugaua

SEQ ID NO: 2043 - RNA, 20 nt, Homo sapiens
ucauaccaauuucucgauug

SEQ ID NO: 2044 - RNA, 20 nt, Homo sapiens
ggauuuagcuauucccacgc

SEQ ID NO: 2045 - RNA, 20 nt, Homo sapiens
uugcucuguuaaaggccgaa

SEQ ID NO: 2046 - RNA, 20 nt, Homo sapiens
uucucgggauacagaccaau

SEQ ID NO: 2047 - RNA, 20 nt, Homo sapiens
cucaccuuauacugacucag

SEQ ID NO: 2048 - RNA, 20 nt, Homo sapiens
agcaaaucuucuaauccaug

SEQ ID NO: 2049 - RNA, 20 nt, Homo sapiens
auaagaagcuguauaaugcu

SEQ ID NO: 2050 - RNA, 20 nt, Homo sapiens
ucaaacuccaacucuaagca

SEQ ID NO: 2051 - RNA, 20 nt, Homo sapiens
ccuuaccugggauuggaaca

SEQ ID NO: 2052 - RNA, 20 nt, Homo sapiens
ggaacacuguccauuggcau

SEQ ID NO: 2053 - RNA, 20 nt, Homo sapiens
aaaacaguuagccagagguu

SEQ ID NO: 2054 - RNA, 20 nt, Homo sapiens
ucuugaagaaguugauggag

SEQ ID NO: 2055 - RNA, 20 nt, Homo sapiens
uguagcguggguaaauacga

SEQ ID NO: 2056 - RNA, 20 nt, Homo sapiens
aaagagcacuugguaaucgg

SEQ ID NO: 2057 - RNA, 20 nt, Homo sapiens
aaaaaugcgcaaauucagcg

SEQ ID NO: 2058 - RNA, 20 nt, Homo sapiens
ugauaccucugagcuuacga

SEQ ID NO: 2059 - RNA, 20 nt, Homo sapiens
gggaaauaaacuuaacacag

SEQ ID NO: 2060 - RNA, 20 nt, Homo sapiens
auugaaagaaaucuuggaca

SEQ ID NO: 2061 - RNA, 20 nt, Homo sapiens
aggagucaauauccauaagg

SEQ ID NO: 2062 - RNA, 20 nt, Homo sapiens
acagcauuauccuguagcgu

SEQ ID NO: 2063 - RNA, 20 nt, Homo sapiens
gaaucagacugcuguauaug

SEQ ID NO: 2064 - RNA, 20 nt, Homo sapiens
uaaaaccaucguaagcucag

SEQ ID NO: 2065 - RNA, 20 nt, Homo sapiens
aucguauuuacccacgcuac

SEQ ID NO: 2066 - RNA, 20 nt, Homo sapiens
uacguucgagaauaugcugu

SEQ ID NO: 2067 - RNA, 20 nt, Homo sapiens
gccuaaacugcccccccggg

SEQ ID NO: 2068 - RNA, 20 nt, Homo sapiens
aauuacugcugucaaucaag

SEQ ID NO: 2069 - RNA, 20 nt, Homo sapiens
uagcuuaccuuaucgaaggg

SEQ ID NO: 2070 - RNA, 20 nt, Homo sapiens
uaauuagcuuaccuuaucga

SEQ ID NO: 2071 - RNA, 20 nt, Homo sapiens
agcuuaccuuaucgaaggga

SEQ ID NO: 2072 - RNA, 20 nt, Homo sapiens
aauuagcuuaccuuaucgaa

SEQ ID NO: 2073 - RNA, 20 nt, Homo sapiens
uucuaauaggaaucuagaga

SEQ ID NO: 2074 - RNA, 20 nt, Homo sapiens
aaaaacguuugacuauucau

SEQ ID NO: 2075 - RNA, 20 nt, Homo sapiens
gacaagaaguugugacccag

SEQ ID NO: 2076 - RNA, 20 nt, Homo sapiens
gaagaaauguugaauccaau

SEQ ID NO: 2077 - RNA, 20 nt, Homo sapiens
cagcauauucucgaacguac

SEQ ID NO: 2078 - RNA, 20 nt, Homo sapiens
aagacaaucccacaagugac

SEQ ID NO: 2079 - RNA, 20 nt, Homo sapiens
ucgauuuauggcagccucua

SEQ ID NO: 2080 - RNA, 20 nt, Homo sapiens
gagaauacguccuccacaug

SEQ ID NO: 2081 - RNA, 20 nt, Homo sapiens
acugugaggucgguguuccg

SEQ ID NO: 2082 - RNA, 20 nt, Homo sapiens
cguggccggccacggcaacg

SEQ ID NO: 2083 - RNA, 20 nt, Homo sapiens
cugaaccuccagaucuacug

SEQ ID NO: 2084 - RNA, 20 nt, Homo sapiens
gagaggguuaaguggaucag

SEQ ID NO: 2085 - RNA, 20 nt, Homo sapiens
uggcggcggacuucuaccac

SEQ ID NO: 2086 - RNA, 20 nt, Homo sapiens
ccagcuucgcaagcaauugg

SEQ ID NO: 2087 - RNA, 20 nt, Homo sapiens
gcucuacgccaugcacccgu

SEQ ID NO: 2088 - RNA, 20 nt, Homo sapiens
acacggugaacacacucucg

SEQ ID NO: 2089 - RNA, 20 nt, Homo sapiens
gucugcaacuaacccagaca

SEQ ID NO: 2090 - RNA, 20 nt, Homo sapiens
cagauaucugccacaugugg

SEQ ID NO: 2091 - RNA, 20 nt, Homo sapiens
cccgugcagucauccaccag

SEQ ID NO: 2092 - RNA, 20 nt, Homo sapiens
ucuuccacagguacuccggg

SEQ ID NO: 2093 - RNA, 20 nt, Homo sapiens
cuuuaccgcaguagaucugg

SEQ ID NO: 2094 - RNA, 20 nt, Homo sapiens
uugccucuacaaaaacugug

SEQ ID NO: 2095 - RNA, 20 nt, Homo sapiens
aguccagacacuaucagcag

SEQ ID NO: 2096 - RNA, 20 nt, Homo sapiens
uccagacccggcccuagacg

SEQ ID NO: 2097 - RNA, 20 nt, Homo sapiens
gaacggagaagagauucacg

SEQ ID NO: 2098 - RNA, 20 nt, Homo sapiens
auaccaauuguuggccagaa

SEQ ID NO: 2099 - RNA, 20 nt, Homo sapiens
cauaccaauuguuggccaga

SEQ ID NO: 2100 - RNA, 20 nt, Homo sapiens
cagccccaaacccuucacag

SEQ ID NO: 2101 - RNA, 20 nt, Homo sapiens
agcucuacgccaugcacccg

SEQ ID NO: 2102 - RNA, 20 nt, Homo sapiens
gcuacuggaaggccacgcac

SEQ ID NO: 2103 - RNA, 20 nt, Homo sapiens
agucugggaucaaagugcuu

SEQ ID NO: 2104 - RNA, 20 nt, Homo sapiens
ggccaagaagaaaucucuga

SEQ ID NO: 2105 - RNA, 20 nt, Homo sapiens
ccugcugucccgguucacug

SEQ ID NO: 2106 - RNA, 20 nt, Homo sapiens
cuagcacuuaccagaaacug

SEQ ID NO: 2107 - RNA, 20 nt, Homo sapiens
caccuacuucuacgccaaug

SEQ ID NO: 2108 - RNA, 20 nt, Homo sapiens
ggccucauuggcguagaagu

SEQ ID NO: 2109 - RNA, 20 nt, Homo sapiens
agcgcaagaaugucuccaug

SEQ ID NO: 2110 - RNA, 20 nt, Homo sapiens
cuugguaguccccaacgcac

SEQ ID NO: 2111 - RNA, 20 nt, Homo sapiens
uauuccaggcacgaauaagc

SEQ ID NO: 2112 - RNA, 20 nt, Homo sapiens
guaccgcagccggcgaaccu

SEQ ID NO: 2113 - RNA, 20 nt, Homo sapiens
agaugaccaggaugcuacag

SEQ ID NO: 2114 - RNA, 20 nt, Homo sapiens
cuauuccaggcacgaauaag

SEQ ID NO: 2115 - RNA, 20 nt, Homo sapiens
gugggucggccacggcagug

SEQ ID NO: 2116 - RNA, 20 nt, Homo sapiens
gagguguuaccugugcguug

SEQ ID NO: 2117 - RNA, 20 nt, Homo sapiens
gugaaagaagcaccuccacu

SEQ ID NO: 2118 - RNA, 20 nt, Homo sapiens
guuggggacuaccaagugcu

SEQ ID NO: 2119 - RNA, 20 nt, Homo sapiens
cauuggcguagaaguaggug

SEQ ID NO: 2120 - RNA, 20 nt, Homo sapiens
uaagcgggacaagcaauacc

SEQ ID NO: 2121 - RNA, 20 nt, Homo sapiens
ccaggaaacuucuaggacag

SEQ ID NO: 2122 - RNA, 20 nt, Homo sapiens
cuccacuccauaguccagga

SEQ ID NO: 2123 - RNA, 20 nt, Homo sapiens
gcgguccccgaaggcccagu

SEQ ID NO: 2124 - RNA, 20 nt, Homo sapiens
acagguagagucagcgauga

SEQ ID NO: 2125 - RNA, 20 nt, Homo sapiens
accauuccugcgguccccga

SEQ ID NO: 2126 - RNA, 20 nt, Homo sapiens
aaaguugggcaucgcaucca

SEQ ID NO: 2127 - RNA, 20 nt, Homo sapiens
cggcuggaaguaggucugcu

SEQ ID NO: 2128 - RNA, 20 nt, Homo sapiens
cucccgcgagcagcccgcag

SEQ ID NO: 2129 - RNA, 20 nt, Homo sapiens
uugucccgcuuauucgugcc

SEQ ID NO: 2130 - RNA, 20 nt, Homo sapiens
cacaccgcagcauagcaccg

SEQ ID NO: 2131 - RNA, 20 nt, Homo sapiens
cccuauaggacacauucgag

SEQ ID NO: 2132 - RNA, 20 nt, Homo sapiens
acagcccgugagugacgagu

SEQ ID NO: 2133 - DNA, 20 bp, Homo sapiens
acacagccggagaaccagca

SEQ ID NO: 2134 - RNA, 20 nt, Homo sapiens
uucagaaggagcuagccucg

SEQ ID NO: 2135 - RNA, 20 nt, Homo sapiens
gcgugguaugaggggaaccu

SEQ ID NO: 2136 - RNA, 20 nt, Homo sapiens
ucguaccagcuucacuccga

SEQ ID NO: 2137 - RNA, 20 nt, Homo sapiens
ccugugccacccgaugcagg

SEQ ID NO: 2138 - RNA, 20 nt, Homo sapiens
cagcccgugagugacgagug

SEQ ID NO: 2139 - RNA, 20 nt, Homo sapiens
acugcccauagacggaugcu

SEQ ID NO: 2140 - RNA, 20 nt, Homo sapiens
gcagugaggcgugguaugag

SEQ ID NO: 2141 - RNA, 20 nt, Homo sapiens
ugguagguguuccacaccca

SEQ ID NO: 2142 - RNA, 20 nt, Homo sapiens
ucagaaggagcuagccucgu

SEQ ID NO: 2143 - RNA, 20 nt, Homo sapiens
uaggacacauucgagcggcu

SEQ ID NO: 2144 - RNA, 20 nt, Homo sapiens
agcccgugagugacgagugg

SEQ ID NO: 2145 - RNA, 20 nt, Homo sapiens
cugguagguguuccacaccc

SEQ ID NO: 2146 - RNA, 20 nt, Homo sapiens
uccuggccuucugacccacg

SEQ ID NO: 2147 - RNA, 20 nt, Homo sapiens
gcucuccugugcccuuaagg

SEQ ID NO: 2148 - RNA, 20 nt, Homo sapiens
aacagcccgugagugacgag

SEQ ID NO: 2149 - RNA, 20 nt, Homo sapiens
ggaaccucggugcuaugcug

SEQ ID NO: 2150 - RNA, 20 nt, Homo sapiens
agggcacaggagagcugaca

SEQ ID NO: 2151 - RNA, 20 nt, Homo sapiens
cagucccugagcuuugaugg

SEQ ID NO: 2152 - RNA, 20 nt, Homo sapiens
cagcaguggucggaggcuga

SEQ ID NO: 2153 - RNA, 20 nt, Homo sapiens
gcuguuccagcgcacagcca

SEQ ID NO: 2154 - RNA, 20 nt, Homo sapiens
ugaagcuauggacucugggc

SEQ ID NO: 2155 - RNA, 20 nt, Homo sapiens
gacaaaggacccuuccgggu

SEQ ID NO: 2156 - RNA, 20 nt, Homo sapiens
uacgcugccauguaugacaa

SEQ ID NO: 2157 - RNA, 20 nt, Homo sapiens
caggauacugaaaguucgca

SEQ ID NO: 2158 - RNA, 20 nt, Homo sapiens
auuuccagaaaggacaucac

SEQ ID NO: 2159 - RNA, 20 nt, Homo sapiens
aaaugcagaaugccacucug

SEQ ID NO: 2160 - RNA, 20 nt, Homo sapiens
gaaugacauucauguccccg

SEQ ID NO: 2161 - RNA, 20 nt, Homo sapiens
cuggaauaucacaaggucug

SEQ ID NO: 2162 - RNA, 20 nt, Homo sapiens
gcagugcuuuccaucaccac

SEQ ID NO: 2163 - RNA, 20 nt, Homo sapiens
aaccauccaccuacccggaa

SEQ ID NO: 2164 - RNA, 20 nt, Homo sapiens
ggacuccaaaccacugcagg

SEQ ID NO: 2165 - RNA, 20 nt, Homo sapiens
gcuccauguacucucugcaa

SEQ ID NO: 2166 - RNA, 20 nt, Homo sapiens
gugcuuuccaucaccacugg

SEQ ID NO: 2167 - RNA, 20 nt, Homo sapiens
agggacuccaaaccacugca

SEQ ID NO: 2168 - RNA, 20 nt, Homo sapiens
cucucugcaagggauccacg

SEQ ID NO: 2169 - RNA, 20 nt, Homo sapiens
gauugaaguucauggcauag

SEQ ID NO: 2170 - RNA, 20 nt, Homo sapiens
guaugacaaaggacccuucc

SEQ ID NO: 2171 - RNA, 20 nt, Homo sapiens
gaaccauccaccuacccgga

SEQ ID NO: 2172 - RNA, 20 nt, Homo sapiens
gcaggauacugaaaguucgc

SEQ ID NO: 2173 - RNA, 20 nt, Homo sapiens
acucucugcaagggauccac

SEQ ID NO: 2174 - RNA, 20 nt, Homo sapiens
accagccuuucagaauggca

SEQ ID NO: 2175 - RNA, 20 nt, Homo sapiens
cuucaacuaugccaugaagg

SEQ ID NO: 2176 - RNA, 20 nt, Homo sapiens
gggacuccaaaccacugcag

SEQ ID NO: 2177 - RNA, 20 nt, Homo sapiens
aguggcauucugcauuucug

SEQ ID NO: 2178 - RNA, 20 nt, Homo sapiens
uaagccagaacagacucggc

SEQ ID NO: 2179 - RNA, 20 nt, Homo sapiens
ccacaauaucugggcucaga

SEQ ID NO: 2180 - RNA, 20 nt, Homo sapiens
ucagaguuucgaagcaugca

SEQ ID NO: 2181 - RNA, 20 nt, Homo sapiens
acuucauauacucucauugg

SEQ ID NO: 2182 - RNA, 20 nt, Homo sapiens
auguauaaucgaaagccagu

SEQ ID NO: 2183 - RNA, 20 nt, Homo sapiens
uuucacaccagaaaacuaua

SEQ ID NO: 2184 - RNA, 20 nt, Homo sapiens
guuaugcaaaauggagcugg

SEQ ID NO: 2185 - RNA, 20 nt, Homo sapiens
agcuggaggagcuuuauuug

SEQ ID NO: 2186 - RNA, 20 nt, Homo sapiens
caccagaaaacuauaaggua

SEQ ID NO: 2187 - RNA, 20 nt, Homo sapiens
gcccaucucugcuaugaaca

SEQ ID NO: 2188 - RNA, 20 nt, Homo sapiens
ugaaaucaaauggaguauca

SEQ ID NO: 2189 - RNA, 20 nt, Homo sapiens
gcuugagccuccuuacccag

SEQ ID NO: 2190 - RNA, 20 nt, Homo sapiens
uagcccaaaggcagaauggg

SEQ ID NO: 2191 - RNA, 20 nt, Homo sapiens
gucagaguuucgaagcaugc

SEQ ID NO: 2192 - RNA, 20 nt, Homo sapiens
caguccuggauuuagcccaa

SEQ ID NO: 2193 - RNA, 20 nt, Homo sapiens
gagccuccuuacccaguggg

SEQ ID NO: 2194 - RNA, 20 nt, Homo sapiens
cauucagaaaaagcuuggua

SEQ ID NO: 2195 - RNA, 20 nt, Homo sapiens
ggcuggccucaccgcccacu

SEQ ID NO: 2196 - RNA, 20 nt, Homo sapiens
ccauucagaaaaagcuuggu

SEQ ID NO: 2197 - RNA, 20 nt, Homo sapiens
auuguaaaaaacuauccaga

SEQ ID NO: 2198 - RNA, 20 nt, Homo sapiens
gccucaccgcccacugggua

SEQ ID NO: 2199 - RNA, 20 nt, Homo sapiens
ggaguaucaggguuauucuc

SEQ ID NO: 2200 - RNA, 20 nt, Homo sapiens
ucugccuuugggcuaaaucc

SEQ ID NO: 2201 - RNA, 20 nt, Homo sapiens
cuugagccuccuuacccagu

SEQ ID NO: 2202 - RNA, 20 nt, Homo sapiens
aaacucugacagcauacugg

SEQ ID NO: 2203 - RNA, 20 nt, Homo sapiens
gcuacuucauauacucucau

SEQ ID NO: 2204 - RNA, 20 nt, Homo sapiens
gaagaacagcugcugcuuua

SEQ ID NO: 2205 - RNA, 20 nt, Homo sapiens
accgugcauuauaacauggg

SEQ ID NO: 2206 - RNA, 20 nt, Homo sapiens
cauuucuacgacaccgugaa

SEQ ID NO: 2207 - RNA, 20 nt, Homo sapiens
auugcacaccuuauauggaa

SEQ ID NO: 2208 - RNA, 20 nt, Homo sapiens
auaaggugugcaauagcgag

SEQ ID NO: 2209 - RNA, 20 nt, Homo sapiens
ugucaucgcacugugcauag

SEQ ID NO: 2210 - RNA, 20 nt, Homo sapiens
cccaccgugcauuauaacau

SEQ ID NO: 2211 - RNA, 20 nt, Homo sapiens
cgccagguccuucgcgacag

SEQ ID NO: 2212 - RNA, 20 nt, Homo sapiens
acaaacucuagguccuggca

SEQ ID NO: 2213 - RNA, 20 nt, Homo sapiens
gcauuucuacgacaccguga

SEQ ID NO: 2214 - RNA, 20 nt, Homo sapiens
augacucuggagauccgaga

SEQ ID NO: 2215 - RNA, 20 nt, Homo sapiens
ggcagacgugcagcugaagu

SEQ ID NO: 2216 - RNA, 20 nt, Homo sapiens
ggaugccauccacuacauga

SEQ ID NO: 2217 - RNA, 20 nt, Homo sapiens
gcauucccaccaacuacaag

SEQ ID NO: 2218 - RNA, 20 nt, Homo sapiens
cgcuggcguggacgucacga

SEQ ID NO: 2219 - RNA, 20 nt, Homo sapiens
gcccaucaccucgaccacgg

SEQ ID NO: 2220 - RNA, 20 nt, Homo sapiens
acgccagguccuucgcgaca

SEQ ID NO: 2221 - RNA, 20 nt, Homo sapiens
gcgauacgccccugucgcga

SEQ ID NO: 2222 - RNA, 20 nt, Homo sapiens
guccugcccuaccuguaggg

SEQ ID NO: 2223 - RNA, 20 nt, Homo sapiens
ucacuguugaugggaacaag

SEQ ID NO: 2224 - RNA, 20 nt, Homo sapiens
uauuaaacccugccucagaa

SEQ ID NO: 2225 - RNA, 20 nt, Homo sapiens
gccgcccauguuauaaugca

SEQ ID NO: 2226 - RNA, 20 nt, Homo sapiens
uucaguuccacccuacaggu

SEQ ID NO: 2227 - RNA, 20 nt, Homo sapiens
ucgcacugugcauagaggac

SEQ ID NO: 2228 - RNA, 20 nt, Homo sapiens
cgcguggccagcugcucugg

SEQ ID NO: 2229 - RNA, 20 nt, Homo sapiens
cguuuagcagaacugaagau

SEQ ID NO: 2230 - RNA, 20 nt, Homo sapiens
uuaaagcauccaauaccaug

SEQ ID NO: 2231 - RNA, 20 nt, Homo sapiens
auggcaaauuucuugauacg

SEQ ID NO: 2232 - RNA, 20 nt, Homo sapiens
ugugcaaugaacaucaaugg

SEQ ID NO: 2233 - RNA, 20 nt, Homo sapiens
cuaucgaugggacccagaca

SEQ ID NO: 2234 - RNA, 20 nt, Homo sapiens
uccuuuaucacauacaugug

SEQ ID NO: 2235 - RNA, 20 nt, Homo sapiens
auuaaagcauccaauaccau

SEQ ID NO: 2236 - RNA, 20 nt, Homo sapiens
gaaauuugccaucuaucgau

SEQ ID NO: 2237 - RNA, 20 nt, Homo sapiens
aaaaaauuucaggccucccg

SEQ ID NO: 2238 - RNA, 20 nt, Homo sapiens
acuucauaagucugcauaug

SEQ ID NO: 2239 - RNA, 20 nt, Homo sapiens
ucacauacauguguggaaga

SEQ ID NO: 2240 - RNA, 20 nt, Homo sapiens
acacucuagcuugcacccga

SEQ ID NO: 2241 - RNA, 20 nt, Homo sapiens
aagaaggaugaaucucagga

SEQ ID NO: 2242 - RNA, 20 nt, Homo sapiens
agaaauuugccaucuaucga

SEQ ID NO: 2243 - RNA, 20 nt, Homo sapiens
ucuugugcaaugaacaucaa

SEQ ID NO: 2244 - RNA, 20 nt, Homo sapiens
cugcaggcaggcuccgccaa

SEQ ID NO: 2245 - RNA, 20 nt, Homo sapiens
uucucugcaugaucuucgga

SEQ ID NO: 2246 - RNA, 20 nt, Homo sapiens
uugccggccacaacccuugg

SEQ ID NO: 2247 - RNA, 20 nt, Homo sapiens
gucugggucccaucgauaga

SEQ ID NO: 2248 - RNA, 20 nt, Homo sapiens
uagauguggccccaugguau

SEQ ID NO: 2249 - RNA, 20 nt, Homo sapiens
cgguugccggccacaacccu

SEQ ID NO: 2250 - RNA, 20 nt, Homo sapiens
gcuccgccaaggguuguggc

SEQ ID NO: 2251 - RNA, 20 nt, Homo sapiens
gauugacaccaaccucaaua

SEQ ID NO: 2252 - RNA, 20 nt, Homo sapiens
ugagccuuauuugaagaaga

SEQ ID NO: 2253 - RNA, 20 nt, Homo sapiens
gauggcaaauuucuugauac

SEQ ID NO: 2254 - RNA, 20 nt, Homo sapiens
cauagaagagcgugagaaac

SEQ ID NO: 2255 - RNA, 20 nt, Homo sapiens
uaccuguagauaguaaugug

SEQ ID NO: 2256 - RNA, 20 nt, Homo sapiens
gccaaaaagagagaccccug

SEQ ID NO: 2257 - RNA, 20 nt, Homo sapiens
cgaauuaacuuaccaagugu

SEQ ID NO: 2258 - RNA, 20 nt, Homo sapiens
auaguaauguggggagacag

SEQ ID NO: 2259 - RNA, 20 nt, Homo sapiens
uaauguggggagacagagga

SEQ ID NO: 2260 - RNA, 20 nt, Homo sapiens
cggccaaagaagagauggag

SEQ ID NO: 2261 - RNA, 20 nt, Homo sapiens
cucuuaucuugcagacacgu

SEQ ID NO: 2262 - RNA, 20 nt, Homo sapiens
uuaccuguagauaguaaugu

SEQ ID NO: 2263 - RNA, 20 nt, Homo sapiens
cuggaaugggauccgacacu

SEQ ID NO: 2264 - RNA, 20 nt, Homo sapiens
ugcuguuccuuugggaacca

SEQ ID NO: 2265 - RNA, 20 nt, Homo sapiens
uuuccuaggucccacaucug

SEQ ID NO: 2266 - RNA, 20 nt, Homo sapiens
ucuuuggccgugguucccaa

SEQ ID NO: 2267 - RNA, 20 nt, Homo sapiens
uuugcuuuguccacagaugu

SEQ ID NO: 2268 - RNA, 20 nt, Homo sapiens
agauggcugcgcuguugcug

SEQ ID NO: 2269 - RNA, 20 nt, Homo sapiens
cuccccacauuacuaucuac

SEQ ID NO: 2270 - RNA, 20 nt, Homo sapiens
cuuaccuguagauaguaaug

SEQ ID NO: 2271 - RNA, 20 nt, Homo sapiens
cacauuacuaucuacaggua

SEQ ID NO: 2272 - RNA, 20 nt, Homo sapiens
ugucggcccuguuacucccu

SEQ ID NO: 2273 - RNA, 20 nt, Homo sapiens
cgguucuggaauaagaauau

SEQ ID NO: 2274 - RNA, 20 nt, Homo sapiens
cuccaucucuucuuuggccg

SEQ ID NO: 2275 - DNA, 20 bp, Homo sapiens
aaccacggccaaagaagaga

SEQ ID NO: 2276 - RNA, 20 nt, Homo sapiens
gaaccgcuccaucucuucuu

SEQ ID NO: 2277 - RNA, 20 nt, Homo sapiens
agcaacagcgcagccaucuu

SEQ ID NO: 2278 - RNA, 20 nt, Homo sapiens
caagugucggaucccauucc

SEQ ID NO: 2279 - RNA, 20 nt, Homo sapiens
cagcaacagcgcagccaucu

SEQ ID NO: 2280 - RNA, 20 nt, Homo sapiens
auggagagaacauacaaugg

SEQ ID NO: 2281 - RNA, 20 nt, Homo sapiens
aguucgaagcaacagagcug

SEQ ID NO: 2282 - RNA, 20 nt, Homo sapiens
ucuguugcuucgaacuccag

SEQ ID NO: 2283 - RNA, 20 nt, Homo sapiens
gagaacauacaaugguggcu

SEQ ID NO: 2284 - RNA, 20 nt, Homo sapiens
aggaccgaccuaucccagaa

SEQ ID NO: 2285 - RNA, 20 nt, Homo sapiens
gccguuugcggugcccuagg

SEQ ID NO: 2286 - RNA, 20 nt, Homo sapiens
acgagauggcgguucucugg

SEQ ID NO: 2287 - RNA, 20 nt, Homo sapiens
uguuacugacuauguucaug

SEQ ID NO: 2288 - RNA, 20 nt, Homo sapiens
ugccuugcagaaagcugcca

SEQ ID NO: 2289 - RNA, 20 nt, Homo sapiens
gaauaguccaucgcagagca

SEQ ID NO: 2290 - RNA, 20 nt, Homo sapiens
ccagugaccaugaagaguga

SEQ ID NO: 2291 - RNA, 20 nt, Homo sapiens
agaaaugcugagauaugagc

SEQ ID NO: 2292 - RNA, 20 nt, Homo sapiens
cgaccuaucccagaauggug

SEQ ID NO: 2293 - RNA, 20 nt, Homo sapiens
ugcggugcccuaggaggccg

SEQ ID NO: 2294 - RNA, 20 nt, Homo sapiens
acuccacaccauucugggau

SEQ ID NO: 2295 - RNA, 20 nt, Homo sapiens
cucuccacuggacuagcgag

SEQ ID NO: 2296 - RNA, 20 nt, Homo sapiens
agugccguuugcggugcccu

SEQ ID NO: 2297 - RNA, 20 nt, Homo sapiens
cucugcgauggacuauuccc

SEQ ID NO: 2298 - RNA, 20 nt, Homo sapiens
gccuccuagggcaccgcaaa

SEQ ID NO: 2299 - RNA, 20 nt, Homo sapiens
agcccucaggaacgagaugg

SEQ ID NO: 2300 - RNA, 20 nt, Homo sapiens
uggaggcugagugccguuug

SEQ ID NO: 2301 - RNA, 20 nt, Homo sapiens
uauuucaacuaucacgaugu

SEQ ID NO: 2302 - RNA, 20 nt, Homo sapiens
ugccuuggcagcuuucugca

SEQ ID NO: 2303 - RNA, 20 nt, Homo sapiens
uuugcuccugggucugcuuc

SEQ ID NO: 2304 - RNA, 20 nt, Homo sapiens
accccucaccucggccuccu

SEQ ID NO: 2305 - RNA, 20 nt, Homo sapiens
agcuauccguggucucaccg

SEQ ID NO: 2306 - RNA, 20 nt, Homo sapiens
ggugggcgugugcuacacgg

SEQ ID NO: 2307 - RNA, 20 nt, Homo sapiens
aaggccagacuucgacgaca

SEQ ID NO: 2308 - RNA, 20 nt, Homo sapiens
ggugagaccacggauagcug

SEQ ID NO: 2309 - RNA, 20 nt, Homo sapiens
uagcucgcacgauguagcug

SEQ ID NO: 2310 - RNA, 20 nt, Homo sapiens
ugagaccacggauagcuggg

SEQ ID NO: 2311 - RNA, 20 nt, Homo sapiens
gugagaccacggauagcugg

SEQ ID NO: 2312 - RNA, 20 nt, Homo sapiens
uggcagguggagguucaaga

SEQ ID NO: 2313 - RNA, 20 nt, Homo sapiens
ucagcuacaucgugcgagcu

SEQ ID NO: 2314 - RNA, 20 nt, Homo sapiens
uggugugguccaaggaagag

SEQ ID NO: 2315 - RNA, 20 nt, Homo sapiens
aaaaccauaccccaacagug

SEQ ID NO: 2316 - RNA, 20 nt, Homo sapiens
ugcacccccccagcuauccg

SEQ ID NO: 2317 - RNA, 20 nt, Homo sapiens
ucgaagucuggccuuucccg

SEQ ID NO: 2318 - RNA, 20 nt, Homo sapiens
acgauguagcugaggucagg

SEQ ID NO: 2319 - RNA, 20 nt, Homo sapiens
gggagauguucaugcggcca

SEQ ID NO: 2320 - RNA, 20 nt, Homo sapiens
aggaggccacggugagacca

SEQ ID NO: 2321 - RNA, 20 nt, Homo sapiens
gagaccacggauagcugggg

SEQ ID NO: 2322 - RNA, 20 nt, Homo sapiens
uaguccucaccaccaugccu

SEQ ID NO: 2323 - RNA, 20 nt, Homo sapiens
cauggaucugguccuaggca

SEQ ID NO: 2324 - RNA, 20 nt, Homo sapiens
ugcacaccugguguggucca

SEQ ID NO: 2325 - RNA, 20 nt, Homo sapiens
ucacuuuccggccucgggaa

SEQ ID NO: 2326 - RNA, 20 nt, Homo sapiens
ggguuuccagguauauaagc

SEQ ID NO: 2327 - RNA, 20 nt, Homo sapiens
aagacggccccaaugaagau

SEQ ID NO: 2328 - RNA, 20 nt, Homo sapiens
gcuggccauggcucugcauu

SEQ ID NO: 2329 - RNA, 20 nt, Homo sapiens
gcgcgcugcacagcagaccc

SEQ ID NO: 2330 - RNA, 20 nt, Homo sapiens
aggacggaucagacgaagag

SEQ ID NO: 2331 - RNA, 20 nt, Homo sapiens
uuaggacggaucagacgaag

SEQ ID NO: 2332 - RNA, 20 nt, Homo sapiens
gcucgcaucugcuauagugg

SEQ ID NO: 2333 - RNA, 20 nt, Homo sapiens
accuucuucgaccccgccgg

SEQ ID NO: 2334 - RNA, 20 nt, Homo sapiens
gaagaugguuaggucuacgg

SEQ ID NO: 2335 - RNA, 20 nt, Homo sapiens
ccagcucggcucgaauaagg

SEQ ID NO: 2336 - RNA, 20 nt, Homo sapiens
auagguguugguauagaaug

SEQ ID NO: 2337 - RNA, 20 nt, Homo sapiens
uggggucuccuccuccggcg

SEQ ID NO: 2338 - RNA, 20 nt, Homo sapiens
ucgggggcaccgauuauuag

SEQ ID NO: 2339 - RNA, 20 nt, Homo sapiens
uccggcggggucgaagaagg

SEQ ID NO: 2340 - RNA, 20 nt, Homo sapiens
aggugucuccucuaucuuag

SEQ ID NO: 2341 - RNA, 20 nt, Homo sapiens
accaccuucuucgaccccgc

SEQ ID NO: 2342 - RNA, 20 nt, Homo sapiens
auugauggccccuaagauag

SEQ ID NO: 2343 - RNA, 20 nt, Homo sapiens
guaauacccaucauaaucgg

SEQ ID NO: 2344 - RNA, 20 nt, Homo sapiens
auaaucaucgcuauccccac

SEQ ID NO: 2345 - RNA, 20 nt, Homo sapiens
gcggggaaacgccauaucgg

SEQ ID NO: 2346 - RNA, 20 nt, Homo sapiens
ugacgauaacguuguagaug

SEQ ID NO: 2347 - RNA, 20 nt, Homo sapiens
ggaggcuuagagcugugccu

SEQ ID NO: 2348 - RNA, 20 nt, Homo sapiens
cugggagagauaggagaagu

SEQ ID NO: 2349 - RNA, 20 nt, Homo sapiens
aauggggucuccuccuccgg

SEQ ID NO: 2350 - RNA, 20 nt, Homo sapiens
agcugacucgccacacucca

SEQ ID NO: 2351 - RNA, 20 nt, Homo sapiens
uaaauacuuugacgccggug

SEQ ID NO: 2352 - RNA, 20 nt, Homo sapiens
gcaucugcuauaguggaggc

SEQ ID NO: 2353 - RNA, 20 nt, Homo sapiens
ggagacaccugcuaggugua

SEQ ID NO: 2354 - RNA, 20 nt, Homo sapiens
accauaccuauguauccaaa

SEQ ID NO: 2355 - RNA, 20 nt, Homo sapiens
auuccucgaccacuaggaca

SEQ ID NO: 2356 - RNA, 20 nt, Homo sapiens
ugcauguaccaauuccgcaa

SEQ ID NO: 2357 - RNA, 20 nt, Homo sapiens
caaauaccgagucuucggau

SEQ ID NO: 2358 - RNA, 20 nt, Homo sapiens
auuuauacagauccuccaag

SEQ ID NO: 2359 - RNA, 20 nt, Homo sapiens
uuucaccgaacgaagauacu

SEQ ID NO: 2360 - RNA, 20 nt, Homo sapiens
caauguagugacgauaaugu

SEQ ID NO: 2361 - RNA, 20 nt, Homo sapiens
aaguguuagcccauagaccu

SEQ ID NO: 2362 - RNA, 20 nt, Homo sapiens
aucugcuuaugcuuucuaag

SEQ ID NO: 2363 - RNA, 20 nt, Homo sapiens
uccacagccgaaugugaaug

SEQ ID NO: 2364 - RNA, 20 nt, Homo sapiens
uauuaccaaagaacacauug

SEQ ID NO: 2365 - RNA, 20 nt, Homo sapiens
gaaaaccgaguaucuucguu

SEQ ID NO: 2366 - RNA, 20 nt, Homo sapiens
auuagaauuccucgaccacu

SEQ ID NO: 2367 - RNA, 20 nt, Homo sapiens
agagcacagcuggucccuug

SEQ ID NO: 2368 - RNA, 20 nt, Homo sapiens
aauguagugacgauaaugua

SEQ ID NO: 2369 - RNA, 20 nt, Homo sapiens
ugacgauaauguagggguaa

SEQ ID NO: 2370 - RNA, 20 nt, Homo sapiens
ggauaacauuacguuaguga

SEQ ID NO: 2371 - RNA, 20 nt, Homo sapiens
aauuccucgaccacuaggac

SEQ ID NO: 2372 - RNA, 20 nt, Homo sapiens
auucaacccauccgaagacu

SEQ ID NO: 2373 - RNA, 20 nt, Homo sapiens
cagaaggaggucugaaugug

SEQ ID NO: 2374 - RNA, 20 nt, Homo sapiens
cugcauguaccaauuccgca

SEQ ID NO: 2375 - RNA, 20 nt, Homo sapiens
ucaaauaccgagucuucgga

SEQ ID NO: 2376 - RNA, 20 nt, Homo sapiens
agcccgucugauggacgaug

SEQ ID NO: 2377 - RNA, 20 nt, Homo sapiens
uacaaauggcaaucacagug

SEQ ID NO: 2378 - RNA, 20 nt, Homo sapiens
ugggguccccaccaacauga

SEQ ID NO: 2379 - RNA, 20 nt, Homo sapiens
aagcccucauggaaaagaug

SEQ ID NO: 2380 - RNA, 20 nt, Homo sapiens
cagguugucuacucgcccag

SEQ ID NO: 2381 - RNA, 20 nt, Homo sapiens
gaugccacagccaaacacga

SEQ ID NO: 2382 - RNA, 20 nt, Homo sapiens
ggacccguugaacaacucug

SEQ ID NO: 2383 - DNA, 20 bp, Homo sapiens
gccacagccaaacacgaagg

SEQ ID NO: 2384 - RNA, 20 nt, Homo sapiens
gggcuccaggaugucagcug

SEQ ID NO: 2385 - RNA, 20 nt, Homo sapiens
guaagaacacugauggcggg

SEQ ID NO: 2386 - RNA, 20 nt, Homo sapiens
uuaccugguaggcucccaca

SEQ ID NO: 2387 - RNA, 20 nt, Homo sapiens
agaagcugguaaaguaguca

SEQ ID NO: 2388 - RNA, 20 nt, Homo sapiens
cucugggcgaguagacaacc

SEQ ID NO: 2389 - RNA, 20 nt, Homo sapiens
ggaugaggggacgucccagg

SEQ ID NO: 2390 - RNA, 20 nt, Homo sapiens
ccagguaagaacacugaugg

SEQ ID NO: 2391 - RNA, 20 nt, Homo sapiens
ucaacaaguugcuggcgcau

SEQ ID NO: 2392 - RNA, 20 nt, Homo sapiens
cagggaccaagugugcucgc

SEQ ID NO: 2393 - DNA, 20 bp, Homo sapiens
acagagcagccccccaagca

SEQ ID NO: 2394 - RNA, 20 nt, Homo sapiens
ucugcagaaacucggccaug

SEQ ID NO: 2395 - RNA, 20 nt, Homo sapiens
cagguaagaacacugauggc

SEQ ID NO: 2396 - RNA, 20 nt, Homo sapiens
ugaagaccggcgagcacacu

SEQ ID NO: 2397 - RNA, 20 nt, Homo sapiens
agggacccguugaacaacuc

SEQ ID NO: 2398 - RNA, 20 nt, Homo sapiens
ccaucagcgccuccacgucg

SEQ ID NO: 2399 - RNA, 20 nt, Homo sapiens
ggccgccgcuuaccucuccg

SEQ ID NO: 2400 - RNA, 20 nt, Homo sapiens
gggacccguugaacaacucu

SEQ ID NO: 2401 - RNA, 20 nt, Homo sapiens
ccaagcuuaccuccuccacg

SEQ ID NO: 2402 - RNA, 20 nt, Homo sapiens
auggccgaguuucugcagac

SEQ ID NO: 2403 - RNA, 20 nt, Homo sapiens
uuaccccagaguuguucaac

SEQ ID NO: 2404 - RNA, 20 nt, Homo sapiens
gagagccugcugcgggauga

SEQ ID NO: 2405 - RNA, 20 nt, Homo sapiens
ccucuauccagaaaacacgg

SEQ ID NO: 2406 - RNA, 20 nt, Homo sapiens
agcauuaaaggacugacuga

SEQ ID NO: 2407 - RNA, 20 nt, Homo sapiens
uaucuccaaacucaugaaca

SEQ ID NO: 2408 - RNA, 20 nt, Homo sapiens
agaaucuucaauagacacau

SEQ ID NO: 2409 - RNA, 20 nt, Homo sapiens
ggaaaguaauggaccaguga

SEQ ID NO: 2410 - RNA, 20 nt, Homo sapiens
uuggagauaauacagcaggu

SEQ ID NO: 2411 - RNA, 20 nt, Homo sapiens
caucaucaauuucgagcaga

SEQ ID NO: 2412 - RNA, 20 nt, Homo sapiens
cucuauccagaaaacacggu

SEQ ID NO: 2413 - RNA, 20 nt, Homo sapiens
uaauggaccagugaaggugu

SEQ ID NO: 2414 - RNA, 20 nt, Homo sapiens
gugggccaaaggaugaagag

SEQ ID NO: 2415 - RNA, 20 nt, Homo sapiens
uaaauaggcuguaccagugc

SEQ ID NO: 2416 - RNA, 20 nt, Homo sapiens
aauccucuauccagaaaaca

SEQ ID NO: 2417 - RNA, 20 nt, Homo sapiens
caugaacauggaauccaugc

SEQ ID NO: 2418 - RNA, 20 nt, Homo sapiens
aauugaugaugcccugcacu

SEQ ID NO: 2419 - RNA, 20 nt, Homo sapiens
aaugugacugcugacaaaga

SEQ ID NO: 2420 - RNA, 20 nt, Homo sapiens
aauggaccagugaaggugug

SEQ ID NO: 2421 - RNA, 20 nt, Homo sapiens
ucaauuucgagcagaaggca

SEQ ID NO: 2422 - RNA, 20 nt, Homo sapiens
gacugcugacaaagauggug

SEQ ID NO: 2423 - RNA, 20 nt, Homo sapiens
gaguuuggagauaauacagc

SEQ ID NO: 2424 - RNA, 20 nt, Homo sapiens
aagguguggggaagcauuaa

SEQ ID NO: 2425 - RNA, 20 nt, Homo sapiens
cuggauagaggauuaaagug

SEQ ID NO: 2426 - RNA, 20 nt, Homo sapiens
ggauuccauguucaugaguu

SEQ ID NO: 2427 - RNA, 20 nt, Homo sapiens
guaauggaccagugaaggug

SEQ ID NO: 2428 - RNA, 20 nt, Homo sapiens
aaauugaugaugcccugcac

SEQ ID NO: 2429 - RNA, 20 nt, Homo sapiens
auuaggcauguuggagacuu

SEQ ID NO: 2430 - RNA, 20 nt, Homo sapiens
acaaaccucagcccuaacgg

SEQ ID NO: 2431 - RNA, 20 nt, Homo sapiens
augaucugcgcguugaugug

SEQ ID NO: 2432 - RNA, 20 nt, Homo sapiens
gacguucagguuguucacgu

SEQ ID NO: 2433 - RNA, 20 nt, Homo sapiens
gaacaaccugaacgucaccg

SEQ ID NO: 2434 - RNA, 20 nt, Homo sapiens
gaagccaucaaacgugacuu

SEQ ID NO: 2435 - RNA, 20 nt, Homo sapiens
gguuguucacguaggccgcg

SEQ ID NO: 2436 - RNA, 20 nt, Homo sapiens
ccaccauugaacuucagugc

SEQ ID NO: 2437 - RNA, 20 nt, Homo sapiens
uccagggcgccguagucgua

SEQ ID NO: 2438 - RNA, 20 nt, Homo sapiens
ccugcacugaaguucaaugg

SEQ ID NO: 2439 - RNA, 20 nt, Homo sapiens
uggacaaaccucagcccuaa

SEQ ID NO: 2440 - RNA, 20 nt, Homo sapiens
gugguggagaacccaaaggu

SEQ ID NO: 2441 - RNA, 20 nt, Homo sapiens
aagcugacggcugcaucugu

SEQ ID NO: 2442 - RNA, 20 nt, Homo sapiens
cccgaccugcccuacgacua

SEQ ID NO: 2443 - DNA, 20 bp, Homo sapiens
gcaccacagcaagcaccacg

SEQ ID NO: 2444 - RNA, 20 nt, Homo sapiens
gggcgccguagucguagggc

SEQ ID NO: 2445 - RNA, 20 nt, Homo sapiens
gcacugaaguucaauggugg

SEQ ID NO: 2446 - RNA, 20 nt, Homo sapiens
cucagccuggaaccuacccu

SEQ ID NO: 2447 - RNA, 20 nt, Homo sapiens
ggagaaguaccaggaggcgu

SEQ ID NO: 2448 - RNA, 20 nt, Homo sapiens
aggaggcguuggccaagggu

SEQ ID NO: 2449 - RNA, 20 nt, Homo sapiens
caccaauauauaccaaccuu

SEQ ID NO: 2450 - RNA, 20 nt, Homo sapiens
caccgaggagaaguaccagg

SEQ ID NO: 2451 - RNA, 20 nt, Homo sapiens
gcccuacgacuacggcgccc

SEQ ID NO: 2452 - RNA, 20 nt, Homo sapiens
caaguuuaaggagaagcuga

SEQ ID NO: 2453 - RNA, 20 nt, Homo sapiens
agucguagggcaggucgggg

SEQ ID NO: 2454 - RNA, 20 nt, Homo sapiens
gagcccagauaccccaaaac

SEQ ID NO: 2455 - RNA, 20 nt, Homo sapiens
aggacgacgccggucacccg

SEQ ID NO: 2456 - RNA, 20 nt, Homo sapiens
gauccgagacauguacgcca

SEQ ID NO: 2457 - RNA, 20 nt, Homo sapiens
agacauguacgccaagguca

SEQ ID NO: 2458 - RNA, 20 nt, Homo sapiens
cugccggaagaggacgacgc

SEQ ID NO: 2459 - RNA, 20 nt, Homo sapiens
cgggccccacuacaacccgc

SEQ ID NO: 2460 - RNA, 20 nt, Homo sapiens
ggcggagcccaacucugacu

SEQ ID NO: 2461 - RNA, 20 nt, Homo sapiens
cauccacgugcaccaguucg

SEQ ID NO: 2462 - RNA, 20 nt, Homo sapiens
aaggcgucgagcuuggcgcg

SEQ ID NO: 2463 - RNA, 20 nt, Homo sapiens
cgaaguugccgaagucgccc

SEQ ID NO: 2464 - RNA, 20 nt, Homo sapiens
acggccagcggguuguagug

SEQ ID NO: 2465 - RNA, 20 nt, Homo sapiens
augcagcggcgggacgacga

SEQ ID NO: 2466 - RNA, 20 nt, Homo sapiens
cucgcccguccaggcguccg

SEQ ID NO: 2467 - RNA, 20 nt, Homo sapiens
ggcaacuucgcgguccgcga

SEQ ID NO: 2468 - RNA, 20 nt, Homo sapiens
gguccccgaacuggugcacg

SEQ ID NO: 2469 - RNA, 20 nt, Homo sapiens
uggagcuguucggcucgguc

SEQ ID NO: 2470 - RNA, 20 nt, Homo sapiens
ggcgaagaaggcgucgagcu

SEQ ID NO: 2471 - RNA, 20 nt, Homo sapiens
gaagcccuccagggcgaaga

SEQ ID NO: 2472 - RNA, 20 nt, Homo sapiens
ggagcccaacucugacucgg

SEQ ID NO: 2473 - RNA, 20 nt, Homo sapiens
ggcaggaggucaugcagcgg

SEQ ID NO: 2474 - RNA, 20 nt, Homo sapiens
ugaccuuggcguacaugucu

SEQ ID NO: 2475 - RNA, 20 nt, Homo sapiens
cuggacgggcgaggacucgg

SEQ ID NO: 2476 - RNA, 20 nt, Homo sapiens
accuccagaggcugccgucg

SEQ ID NO: 2477 - RNA, 20 nt, Homo sapiens
auggcgcggcuggagcuguu

SEQ ID NO: 2478 - RNA, 20 nt, Homo sapiens
gccagggcugcgaguccacc

SEQ ID NO: 2479 - RNA, 20 nt, Homo sapiens
gcgaaguugccgaagucgcc

SEQ ID NO: 2480 - RNA, 20 nt, Homo sapiens
ccacuuguuaacagagaccg

SEQ ID NO: 2481 - RNA, 20 nt, Homo sapiens
ugagagacuccaguugccag

SEQ ID NO: 2482 - RNA, 20 nt, Homo sapiens
cuuguggcgcugaaaacgaa

SEQ ID NO: 2483 - RNA, 20 nt, Homo sapiens
ugccacuucucaguacaugu

SEQ ID NO: 2484 - RNA, 20 nt, Homo sapiens
aguuguacugaaguccacuu

SEQ ID NO: 2485 - RNA, 20 nt, Homo sapiens
gaggcaauugccgucaccug

SEQ ID NO: 2486 - RNA, 20 nt, Homo sapiens
ugucauagccgagaacaaug

SEQ ID NO: 2487 - RNA, 20 nt, Homo sapiens
ccccggucucuguuaacaag

SEQ ID NO: 2488 - RNA, 20 nt, Homo sapiens
uaugccaugagugcucagag

SEQ ID NO: 2489 - RNA, 20 nt, Homo sapiens
gacacacccauggcccgaag

SEQ ID NO: 2490 - RNA, 20 nt, Homo sapiens
aaccaugcaccgauacacac

SEQ ID NO: 2491 - RNA, 20 nt, Homo sapiens
ucaacuggugucgagaaguc

SEQ ID NO: 2492 - RNA, 20 nt, Homo sapiens
gccacuucucaguacaugug

SEQ ID NO: 2493 - RNA, 20 nt, Homo sapiens
uccucaggguuccacgccaa

SEQ ID NO: 2494 - RNA, 20 nt, Homo sapiens
gcugucauagccgagaacaa

SEQ ID NO: 2495 - RNA, 20 nt, Homo sapiens
uguuaacaaguggaacagcu

SEQ ID NO: 2496 - RNA, 20 nt, Homo sapiens
cuuugcuaugauacucgggu

SEQ ID NO: 2497 - RNA, 20 nt, Homo sapiens
cucaggaauuuguugaaacg

SEQ ID NO: 2498 - RNA, 20 nt, Homo sapiens
agaaauccccguccaaggcu

SEQ ID NO: 2499 - DNA, 20 bp, Homo sapiens
ggcaggaaaacagcgagcag

SEQ ID NO: 2500 - RNA, 20 nt, Homo sapiens
gcacucauggcauaaaggcu

SEQ ID NO: 2501 - RNA, 20 nt, Homo sapiens
ucacugaacagaaaagggcu

SEQ ID NO: 2502 - RNA, 20 nt, Homo sapiens
aauuccacccacuuucaaag

SEQ ID NO: 2503 - RNA, 20 nt, Homo sapiens
cgggauccaagugccuugug

SEQ ID NO: 2504 - RNA, 20 nt, Homo sapiens
ugaugagaugaguugugcca

SEQ ID NO: 2505 - RNA, 20 nt, Homo sapiens
ccauuguucaauaucguccg

SEQ ID NO: 2506 - RNA, 20 nt, Homo sapiens
gagcgcugcucagauagcga

SEQ ID NO: 2507 - RNA, 20 nt, Homo sapiens
uccucagcaucuuauccgag

SEQ ID NO: 2508 - RNA, 20 nt, Homo sapiens
aguggaaggaaauuugcgug

SEQ ID NO: 2509 - RNA, 20 nt, Homo sapiens
gcagucacagcacaugacgg

SEQ ID NO: 2510 - RNA, 20 nt, Homo sapiens
ccccggacgauauugaacaa

SEQ ID NO: 2511 - RNA, 20 nt, Homo sapiens
aaaucauccauugcuuggga

SEQ ID NO: 2512 - RNA, 20 nt, Homo sapiens
auguguaacaguuccugcau

SEQ ID NO: 2513 - RNA, 20 nt, Homo sapiens
ggugcccuaugagccgccug

SEQ ID NO: 2514 - RNA, 20 nt, Homo sapiens
ucggauaagaugcugaggag

SEQ ID NO: 2515 - RNA, 20 nt, Homo sapiens
ccaguugcaaaccagaccuc

SEQ ID NO: 2516 - RNA, 20 nt, Homo sapiens
agcacaugacggagguugug

SEQ ID NO: 2517 - RNA, 20 nt, Homo sapiens
uccacucggauaagaugcug

SEQ ID NO: 2518 - RNA, 20 nt, Homo sapiens
aaucaacccacagcugcaca

SEQ ID NO: 2519 - RNA, 20 nt, Homo sapiens
gaaaccguagcugcccuggu

SEQ ID NO: 2520 - RNA, 20 nt, Homo sapiens
accauuguucaauaucgucc

SEQ ID NO: 2521 - RNA, 20 nt, Homo sapiens
uccauugcuugggacggcaa

SEQ ID NO: 2522 - RNA, 20 nt, Homo sapiens
gccagaggcugcuccccccg

SEQ ID NO: 2523 - RNA, 20 nt, Homo sapiens
cagaaugcaagaagcccaga

SEQ ID NO: 2524 - RNA, 20 nt, Homo sapiens
guugcaaaccagaccucagg

SEQ ID NO: 2525 - RNA, 20 nt, Homo sapiens
accagcagcuccuacaccgg

SEQ ID NO: 2526 - RNA, 20 nt, Homo sapiens
ccuucccagaaaaccuacca

SEQ ID NO: 2527 - RNA, 20 nt, Homo sapiens
gauccacucacaguuuccau

SEQ ID NO: 2528 - RNA, 20 nt, Homo sapiens
uguaacaguuccugcauggg

SEQ ID NO: 2529 - RNA, 20 nt, Homo sapiens
ccagaccucaggcggcucau

SEQ ID NO: 2530 - RNA, 20 nt, Homo sapiens
acagcauagacagacaugcu

SEQ ID NO: 2531 - RNA, 20 nt, Homo sapiens
uggauuaaccacuaucaagg

SEQ ID NO: 2532 - RNA, 20 nt, Homo sapiens
uauguaauucaucaguccca

SEQ ID NO: 2533 - RNA, 20 nt, Homo sapiens
auguaauucaucagucccac

SEQ ID NO: 2534 - RNA, 20 nt, Homo sapiens
auccaccugcaguaaaacau

SEQ ID NO: 2535 - RNA, 20 nt, Homo sapiens
guuugagucauguccaaugg

SEQ ID NO: 2536 - RNA, 20 nt, Homo sapiens
uacgaucuagauacuugcac

SEQ ID NO: 2537 - RNA, 20 nt, Homo sapiens
ugacucaaacuggagaaagc

SEQ ID NO: 2538 - RNA, 20 nt, Homo sapiens
uaauucaucagucccacggg

SEQ ID NO: 2539 - RNA, 20 nt, Homo sapiens
cggguggccucacugagacc

SEQ ID NO: 2540 - RNA, 20 nt, Homo sapiens
uaacguaccugggacuacuu

SEQ ID NO: 2541 - RNA, 20 nt, Homo sapiens
uacauagcccaaguaguccc

SEQ ID NO: 2542 - RNA, 20 nt, Homo sapiens
ccaccugcaguaaaacaugg

SEQ ID NO: 2543 - RNA, 20 nt, Homo sapiens
ccaguuugagucauguccaa

SEQ ID NO: 2544 - RNA, 20 nt, Homo sapiens
ccauuggacaugacucaaac

SEQ ID NO: 2545 - RNA, 20 nt, Homo sapiens
cuccugcccuggucucagug

SEQ ID NO: 2546 - RNA, 20 nt, Homo sapiens
cacagcauagacagacaugc

SEQ ID NO: 2547 - RNA, 20 nt, Homo sapiens
caagguggaaacaaguccua

SEQ ID NO: 2548 - RNA, 20 nt, Homo sapiens
cugcaguaaaacaugggggu

SEQ ID NO: 2549 - RNA, 20 nt, Homo sapiens
cucaagagaugccgguaaac

SEQ ID NO: 2550 - RNA, 20 nt, Homo sapiens
guaaacaggaaaagacugaa

SEQ ID NO: 2551 - RNA, 20 nt, Homo sapiens
aagacugaagggugcucagu

SEQ ID NO: 2552 - RNA, 20 nt, Homo sapiens
gguaaacaggaaaagacuga

SEQ ID NO: 2553 - RNA, 20 nt, Homo sapiens
ggguggccucacugagacca

SEQ ID NO: 2554 - RNA, 20 nt, Homo sapiens
auugaauucugguucuuggu

SEQ ID NO: 2555 - RNA, 20 nt, Homo sapiens
aagguagagcaucaucacgg

SEQ ID NO: 2556 - RNA, 20 nt, Homo sapiens
gcacacagcuuacuacauca

SEQ ID NO: 2557 - RNA, 20 nt, Homo sapiens
auguccaugggaugccaccg

SEQ ID NO: 2558 - RNA, 20 nt, Homo sapiens
caaaagguagagcaucauca

SEQ ID NO: 2559 - RNA, 20 nt, Homo sapiens
aggaacgugaugugauccug

SEQ ID NO: 2560 - RNA, 20 nt, Homo sapiens
gggccuuguaaugugugcug

SEQ ID NO: 2561 - RNA, 20 nt, Homo sapiens
gaagcggcauggaguaagag

SEQ ID NO: 2562 - RNA, 20 nt, Homo sapiens
acauuacaaggccccucgaa

SEQ ID NO: 2563 - RNA, 20 nt, Homo sapiens
cuguccaaggaucugccgaa

SEQ ID NO: 2564 - RNA, 20 nt, Homo sapiens
caucccauggacauaugcag

SEQ ID NO: 2565 - RNA, 20 nt, Homo sapiens
ugaugcaucuaugcgagaug

SEQ ID NO: 2566 - RNA, 20 nt, Homo sapiens
ggugcuguaggcauuaagau

SEQ ID NO: 2567 - RNA, 20 nt, Homo sapiens
ccccaacucaccgugcaagu

SEQ ID NO: 2568 - RNA, 20 nt, Homo sapiens
gcagucauaguggccgauga

SEQ ID NO: 2569 - RNA, 20 nt, Homo sapiens
aagcggcauggaguaagagu

SEQ ID NO: 2570 - RNA, 20 nt, Homo sapiens
aguucugcacaaugucaccc

SEQ ID NO: 2571 - RNA, 20 nt, Homo sapiens
cucuacugcaauggccacgu

SEQ ID NO: 2572 - RNA, 20 nt, Homo sapiens
ucuuaaugccuacagcaccc

SEQ ID NO: 2573 - RNA, 20 nt, Homo sapiens
ugcugccagcaccauucgag

SEQ ID NO: 2574 - RNA, 20 nt, Homo sapiens
ugagacugagaagaauaaug

SEQ ID NO: 2575 - RNA, 20 nt, Homo sapiens
cuugcaaggccacauugucc

SEQ ID NO: 2576 - RNA, 20 nt, Homo sapiens
cugcugccagcaccauucga

SEQ ID NO: 2577 - RNA, 20 nt, Homo sapiens
cagggaacaaagaaucggcc

SEQ ID NO: 2578 - RNA, 20 nt, Homo sapiens
gaagguugccguacuccgca

SEQ ID NO: 2579 - RNA, 20 nt, Homo sapiens
ccugggcuagaggugugccc

SEQ ID NO: 2580 - RNA, 20 nt, Homo sapiens
aguuagugggacuaaccuca

SEQ ID NO: 2581 - RNA, 20 nt, Homo sapiens
ggacuaaccucaagguccug

SEQ ID NO: 2582 - RNA, 20 nt, Homo sapiens
gccacaaccucaggaccuug

SEQ ID NO: 2583 - RNA, 20 nt, Homo sapiens
ucaagguccugagguugugg

SEQ ID NO: 2584 - RNA, 20 nt, Homo sapiens
gaaauguacuuacgagucug

SEQ ID NO: 2585 - RNA, 20 nt, Homo sapiens
ggugcaaaggccaacuaccg

SEQ ID NO: 2586 - RNA, 20 nt, Homo sapiens
uaaagcaggcaguagauaug

SEQ ID NO: 2587 - RNA, 20 nt, Homo sapiens
guacuuacacaucaccccgc

SEQ ID NO: 2588 - RNA, 20 nt, Homo sapiens
uguaagacgcagcaaauggg

SEQ ID NO: 2589 - RNA, 20 nt, Homo sapiens
gaacaguuucucaacaugag

SEQ ID NO: 2590 - RNA, 20 nt, Homo sapiens
ugaacaguuucucaacauga

SEQ ID NO: 2591 - RNA, 20 nt, Homo sapiens
ugaacgaaguaauguaacug

SEQ ID NO: 2592 - RNA, 20 nt, Homo sapiens
gauucagugugaccgcaaca

SEQ ID NO: 2593 - RNA, 20 nt, Homo sapiens
acaauacaagggauuagcca

SEQ ID NO: 2594 - RNA, 20 nt, Homo sapiens
gcuuugucaaucuuuagcug

SEQ ID NO: 2595 - RNA, 20 nt, Homo sapiens
gcaaaggccaacuaccgugg

SEQ ID NO: 2596 - RNA, 20 nt, Homo sapiens
auucagugugaccgcaacaa

SEQ ID NO: 2597 - RNA, 20 nt, Homo sapiens
uaccaaguuaccaaauggcu

SEQ ID NO: 2598 - RNA, 20 nt, Homo sapiens
gaagcaaucaccaagccauu

SEQ ID NO: 2599 - RNA, 20 nt, Homo sapiens
aguuucucaacaugaggggu

SEQ ID NO: 2600 - RNA, 20 nt, Homo sapiens
ucaucuuucaagauaacccg

SEQ ID NO: 2601 - RNA, 20 nt, Homo sapiens
gauuggaaaagugacaucag

SEQ ID NO: 2602 - RNA, 20 nt, Homo sapiens
ggaaaacauggcuuauacug

SEQ ID NO: 2603 - RNA, 20 nt, Homo sapiens
ugacauguggcccagcaccg

SEQ ID NO: 2604 - RNA, 20 nt, Homo sapiens
ucagcaacuugcuuuagaac

SEQ ID NO: 2605 - RNA, 20 nt, Homo sapiens
aaauacaaaaaccuggaacg

SEQ ID NO: 2606 - RNA, 20 nt, Homo sapiens
auggcaauguguccuaugcu

SEQ ID NO: 2607 - RNA, 20 nt, Homo sapiens
accaaacagcauacagacga

SEQ ID NO: 2608 - RNA, 20 nt, Homo sapiens
cggccaaaaucugaauucug

SEQ ID NO: 2609 - RNA, 20 nt, Homo sapiens
auuucaucacauauugaagu

SEQ ID NO: 2610 - RNA, 20 nt, Homo sapiens
ccacacccugaaucucacuc

SEQ ID NO: 2611 - RNA, 20 nt, Homo sapiens
gacugucagaaugcccauca

SEQ ID NO: 2612 - RNA, 20 nt, Homo sapiens
acuuaccaaauacaaaaacc

SEQ ID NO: 2613 - RNA, 20 nt, Homo sapiens
uguguuccacuuacccugau

SEQ ID NO: 2614 - RNA, 20 nt, Homo sapiens
cucaagguguaucagggcaa

SEQ ID NO: 2615 - RNA, 20 nt, Homo sapiens
uguccuaugcuugguacaga

SEQ ID NO: 2616 - RNA, 20 nt, Homo sapiens
uugagaaaccccgccuacag

SEQ ID NO: 2617 - RNA, 20 nt, Homo sapiens
gaacuugagucuucucauca

SEQ ID NO: 2618 - RNA, 20 nt, Homo sapiens
auaggacacauugccauccc

SEQ ID NO: 2619 - RNA, 20 nt, Homo sapiens
cucccgagaugcuaaccaca

SEQ ID NO: 2620 - RNA, 20 nt, Homo sapiens
guguccuaugcuugguacag

SEQ ID NO: 2621 - RNA, 20 nt, Homo sapiens
gcaagcugauccagacagca

SEQ ID NO: 2622 - RNA, 20 nt, Homo sapiens
guugagaaaccccgccuaca

SEQ ID NO: 2623 - RNA, 20 nt, Homo sapiens
cuaucauuggaaguauugga

SEQ ID NO: 2624 - RNA, 20 nt, Homo sapiens
guguguuccacuuacccuga

SEQ ID NO: 2625 - RNA, 20 nt, Homo sapiens
gcucccucuguaccaagcau

SEQ ID NO: 2626 - RNA, 20 nt, Homo sapiens
aggggaagauccuggacaga

SEQ ID NO: 2627 - RNA, 20 nt, Homo sapiens
ccucaccuaccuggacgagg

SEQ ID NO: 2628 - RNA, 20 nt, Homo sapiens
agaagcaggcaagggugcca

SEQ ID NO: 2629 - RNA, 20 nt, Homo sapiens
guguggcuuucccagcuaac

SEQ ID NO: 2630 - RNA, 20 nt, Homo sapiens
guggcauggcaggacuacgu

SEQ ID NO: 2631 - RNA, 20 nt, Homo sapiens
cguaccgcauguccucaaag

SEQ ID NO: 2632 - RNA, 20 nt, Homo sapiens
ggacacgcccagcuucaagu

SEQ ID NO: 2633 - RNA, 20 nt, Homo sapiens
gcagcucccauauuccccug

SEQ ID NO: 2634 - RNA, 20 nt, Homo sapiens
gcgaguacuucguuccaaca

SEQ ID NO: 2635 - RNA, 20 nt, Homo sapiens
aaccuuagaucccccgacaa

SEQ ID NO: 2636 - RNA, 20 nt, Homo sapiens
cuggagugacaugcgacagg

SEQ ID NO: 2637 - RNA, 20 nt, Homo sapiens
uuggacagcccaagacaucg

SEQ ID NO: 2638 - RNA, 20 nt, Homo sapiens
gcccuacagugaucccagcg

SEQ ID NO: 2639 - RNA, 20 nt, Homo sapiens
aacaggcuacuaccugaccu

SEQ ID NO: 2640 - RNA, 20 nt, Homo sapiens
aaugcagagaaagcuaucug

SEQ ID NO: 2641 - RNA, 20 nt, Homo sapiens
accaggucaucaccccauag

SEQ ID NO: 2642 - RNA, 20 nt, Homo sapiens
gagagugacacgcugaccau

SEQ ID NO: 2643 - RNA, 20 nt, Homo sapiens
guggacccuuacucccgcag

SEQ ID NO: 2644 - RNA, 20 nt, Homo sapiens
uauucucucuacacaccaca

SEQ ID NO: 2645 - RNA, 20 nt, Homo sapiens
ccaugccacacacaggacgu

SEQ ID NO: 2646 - RNA, 20 nt, Homo sapiens
cacgaucaggcugaacacaa

SEQ ID NO: 2647 - RNA, 20 nt, Homo sapiens
gcugugucucguauugucug

SEQ ID NO: 2648 - RNA, 20 nt, Homo sapiens
gcaaugcagacaaacacagc

SEQ ID NO: 2649 - RNA, 20 nt, Homo sapiens
aaccccagaguccuuaccga

SEQ ID NO: 2650 - RNA, 20 nt, Homo sapiens
caugccacacacaggacgua

SEQ ID NO: 2651 - RNA, 20 nt, Homo sapiens
cugcugcugaaauaccgaca

SEQ ID NO: 2652 - RNA, 20 nt, Homo sapiens
acccggucaggauugaccug

SEQ ID NO: 2653 - RNA, 20 nt, Homo sapiens
gcccggcugguggaagacau

SEQ ID NO: 2654 - RNA, 20 nt, Homo sapiens
acuuguagaguugucauaga

SEQ ID NO: 2655 - RNA, 20 nt, Homo sapiens
acccacggcuacaaagcgca

SEQ ID NO: 2656 - RNA, 20 nt, Homo sapiens
gcucggcuauggaccacacg

SEQ ID NO: 2657 - RNA, 20 nt, Homo sapiens
guaccagggcacuuugcgaa

SEQ ID NO: 2658 - RNA, 20 nt, Homo sapiens
ugcucggcuauggaccacac

SEQ ID NO: 2659 - RNA, 20 nt, Homo sapiens
cuggacacagugacacuaug

SEQ ID NO: 2660 - RNA, 20 nt, Homo sapiens
ccccaaugccccauuccaca

SEQ ID NO: 2661 - RNA, 20 nt, Homo sapiens
uggcuggccacuaccccgug

SEQ ID NO: 2662 - RNA, 20 nt, Homo sapiens
ccacagacacauuggucugu

SEQ ID NO: 2663 - RNA, 20 nt, Homo sapiens
cguaccagggcacuuugcga

SEQ ID NO: 2664 - RNA, 20 nt, Homo sapiens
cggcuacaaagcgcagggca

SEQ ID NO: 2665 - RNA, 20 nt, Homo sapiens
acucuaagaucuccaagcgc

SEQ ID NO: 2666 - RNA, 20 nt, Homo sapiens
gccacagacacauuggucug

SEQ ID NO: 2667 - RNA, 20 nt, Homo sapiens
cuauggaccacacgggguag

SEQ ID NO: 2668 - RNA, 20 nt, Homo sapiens
gucagagaauacguccucaa

SEQ ID NO: 2669 - RNA, 20 nt, Homo sapiens
gcaggcgguagaaagggcug

SEQ ID NO: 2670 - RNA, 20 nt, Homo sapiens
gccggaaaccaugaccaccu

SEQ ID NO: 2671 - RNA, 20 nt, Homo sapiens
uuuccggcuagcacguacca

SEQ ID NO: 2672 - RNA, 20 nt, Homo sapiens
agacuucauccugucucuag

SEQ ID NO: 2673 - RNA, 20 nt, Homo sapiens
gaucuuagaguaugcaaucu

SEQ ID NO: 2674 - RNA, 20 nt, Homo sapiens
ccaaugccaaggagaucgcu

SEQ ID NO: 2675 - RNA, 20 nt, Homo sapiens
cccacagaccaaugugucug

SEQ ID NO: 2676 - RNA, 20 nt, Homo sapiens
guuuccggcuagcacguacc

SEQ ID NO: 2677 - RNA, 20 nt, Homo sapiens
gugcucggcuauggaccaca

SEQ ID NO: 2678 - RNA, 20 nt, Homo sapiens
uggccauuucccgggccgug

SEQ ID NO: 2679 - RNA, 20 nt, Homo sapiens
cuggcucaagaaacagcugg

SEQ ID NO: 2680 - RNA, 20 nt, Homo sapiens
uucuuguagggugaacaccg

SEQ ID NO: 2681 - RNA, 20 nt, Homo sapiens
aggcaaucaacaccucucug

SEQ ID NO: 2682 - RNA, 20 nt, Homo sapiens
cguucuccccaaucaagaca

SEQ ID NO: 2683 - RNA, 20 nt, Homo sapiens
acagguuugacuagcgaacu

SEQ ID NO: 2684 - RNA, 20 nt, Homo sapiens
cuacuugccuccaguaccag

SEQ ID NO: 2685 - RNA, 20 nt, Homo sapiens
uugaguguaugcacaaauug

SEQ ID NO: 2686 - RNA, 20 nt, Homo sapiens
uucugagaugcacgccccug

SEQ ID NO: 2687 - RNA, 20 nt, Homo sapiens
ccacagcacaugaucugucu

SEQ ID NO: 2688 - RNA, 20 nt, Homo sapiens
uaccugaacaccaacccugu

SEQ ID NO: 2689 - RNA, 20 nt, Homo sapiens
agggggaugucuauagacaa

SEQ ID NO: 2690 - RNA, 20 nt, Homo sapiens
ucugucaaaugccauauggg

SEQ ID NO: 2691 - RNA, 20 nt, Homo sapiens
gugcauacacucaagcagug

SEQ ID NO: 2692 - RNA, 20 nt, Homo sapiens
ucuaccaagaucaggaacaa

SEQ ID NO: 2693 - RNA, 20 nt, Homo sapiens
gggccauuguaaugaacagg

SEQ ID NO: 2694 - RNA, 20 nt, Homo sapiens
gucucuuaccgagguucaug

SEQ ID NO: 2695 - RNA, 20 nt, Homo sapiens
uucaacaugauagagcagag

SEQ ID NO: 2696 - RNA, 20 nt, Homo sapiens
aaaguuagaaaacaggcaag

SEQ ID NO: 2697 - RNA, 20 nt, Homo sapiens
cagggggaugucuauagaca

SEQ ID NO: 2698 - RNA, 20 nt, Homo sapiens
uuccaauacuguguugcagu

SEQ ID NO: 2699 - RNA, 20 nt, Homo sapiens
acucaagcaguguggugacg

SEQ ID NO: 2700 - RNA, 20 nt, Homo sapiens
gagugcucccagcaagaaag

SEQ ID NO: 2701 - RNA, 20 nt, Homo sapiens
ugucaaaugccauaugggag

SEQ ID NO: 2702 - RNA, 20 nt, Homo sapiens
agcggagugguaagaccaga

SEQ ID NO: 2703 - RNA, 20 nt, Homo sapiens
ugucuucagguuccaaaccu

SEQ ID NO: 2704 - RNA, 20 nt, Homo sapiens
ugaagcuggaagcaagaaag

SEQ ID NO: 2705 - RNA, 20 nt, Homo sapiens
acucaucaaaaucugacagg

SEQ ID NO: 2706 - RNA, 20 nt, Homo sapiens
cacgucaccuauguucugcg

SEQ ID NO: 2707 - RNA, 20 nt, Homo sapiens
acgucaccuauguucugcgg

SEQ ID NO: 2708 - RNA, 20 nt, Homo sapiens
cagugggaaacguaccaagg

SEQ ID NO: 2709 - RNA, 20 nt, Homo sapiens
agugggaaacguaccaaggu

SEQ ID NO: 2710 - RNA, 20 nt, Homo sapiens
cagaacauaggugacgugua

SEQ ID NO: 2711 - RNA, 20 nt, Homo sapiens
ccucaaacaagccuggcaag

SEQ ID NO: 2712 - RNA, 20 nt, Homo sapiens
ggaugaagucacaaaggggu

SEQ ID NO: 2713 - RNA, 20 nt, Homo sapiens
ccagucgauguuccccaccc

SEQ ID NO: 2714 - RNA, 20 nt, Homo sapiens
ugucucucaugcaggcaacg

SEQ ID NO: 2715 - RNA, 20 nt, Homo sapiens
uugguguugaugaugccgcu

SEQ ID NO: 2716 - RNA, 20 nt, Homo sapiens
aggccaacucaaaaggcuca

SEQ ID NO: 2717 - RNA, 20 nt, Homo sapiens
gaacaucgacuggugcuggu

SEQ ID NO: 2718 - RNA, 20 nt, Homo sapiens
cacuccccaucuuucaguau

SEQ ID NO: 2719 - RNA, 20 nt, Homo sapiens
ggcauccccccgcagaacau

SEQ ID NO: 2720 - RNA, 20 nt, Homo sapiens
acuucauccaacugcaccgu

SEQ ID NO: 2721 - RNA, 20 nt, Homo sapiens
uuccaggggggcaacaacgc

SEQ ID NO: 2722 - RNA, 20 nt, Homo sapiens
aguuggaugaagucacaaag

SEQ ID NO: 2723 - RNA, 20 nt, Homo sapiens
gcugaugaugucggcguccg

SEQ ID NO: 2724 - RNA, 20 nt, Homo sapiens
ucauccaacugcaccguggg

SEQ ID NO: 2725 - RNA, 20 nt, Homo sapiens
gcccagcaccaccgucacgc

SEQ ID NO: 2726 - RNA, 20 nt, Homo sapiens
cauaggugacguguauggcg

SEQ ID NO: 2727 - RNA, 20 nt, Homo sapiens
cgucaccuauguucugcggg

SEQ ID NO: 2728 - RNA, 20 nt, Homo sapiens
aaaacucaucaaaaucugac

SEQ ID NO: 2729 - RNA, 20 nt, Homo sapiens
acauaccgaagucaaugucg

SEQ ID NO: 2730 - RNA, 20 nt, Homo sapiens
cagcuuuggacgaauaaacu

SEQ ID NO: 2731 - RNA, 20 nt, Homo sapiens
uuuauucguccaaagcugcu

SEQ ID NO: 2732 - RNA, 20 nt, Homo sapiens
uugaugaaaaucaaauacug

SEQ ID NO: 2733 - RNA, 20 nt, Homo sapiens
cagaauccacaacaacugua

SEQ ID NO: 2734 - RNA, 20 nt, Homo sapiens
aggugaauuacaaaaacuca

SEQ ID NO: 2735 - RNA, 20 nt, Homo sapiens
caaugucuauuuccaaagug

SEQ ID NO: 2736 - RNA, 20 nt, Homo sapiens
uuuggauuaauuauuccacu

SEQ ID NO: 2737 - RNA, 20 nt, Homo sapiens
cuggcagcggcacacgaugu

SEQ ID NO: 2738 - RNA, 20 nt, Homo sapiens
ggugcgcaguggggcgacga

SEQ ID NO: 2739 - RNA, 20 nt, Homo sapiens
cggaggaaaccgggugacgg

SEQ ID NO: 2740 - RNA, 20 nt, Homo sapiens
guggugcucggugcgcagug

SEQ ID NO: 2741 - RNA, 20 nt, Homo sapiens
gguaugccaccucaaaaugu

SEQ ID NO: 2742 - RNA, 20 nt, Homo sapiens
aauuugaagagguuacaaaa

SEQ ID NO: 2743 - RNA, 20 nt, Homo sapiens
uauggaaaagauuaaaccaa

SEQ ID NO: 2744 - RNA, 20 nt, Homo sapiens
caaaucuauauaccccacuu

SEQ ID NO: 2745 - RNA, 20 nt, Homo sapiens
agccaucaaagucagaaaca

SEQ ID NO: 2746 - RNA, 20 nt, Homo sapiens
uacaguuguuguggauucug

SEQ ID NO: 2747 - RNA, 20 nt, Homo sapiens
uccaacaguacaauuugaag

SEQ ID NO: 2748 - DNA, 20 bp, Homo sapiens
gggcgacgaaggcaaaggga

SEQ ID NO: 2749 - RNA, 20 nt, Homo sapiens
uuucuauaugaggcccuaca

SEQ ID NO: 2750 - RNA, 20 nt, Homo sapiens
cuuucuaggacuagaaggcu

SEQ ID NO: 2751 - RNA, 20 nt, Homo sapiens
ccuuucuaggacuagaaggc

SEQ ID NO: 2752 - RNA, 20 nt, Homo sapiens
acuuugauggcuucucugag

SEQ ID NO: 2753 - RNA, 20 nt, Homo sapiens
uggaccaccaaagaaaaucu

SEQ ID NO: 2754 - RNA, 20 nt, Homo sapiens
ggugugguaauucaucuacc

SEQ ID NO: 2755 - RNA, 20 nt, Homo sapiens
ccucacaccagaccuacgga

SEQ ID NO: 2756 - RNA, 20 nt, Homo sapiens
cccucacaccagaccuacgg

SEQ ID NO: 2757 - RNA, 20 nt, Homo sapiens
uuccgugauucagccacccu

SEQ ID NO: 2758 - RNA, 20 nt, Homo sapiens
acucacaaccccaacaggaa

SEQ ID NO: 2759 - RNA, 20 nt, Homo sapiens
cgauggccuuguaguuacac

SEQ ID NO: 2760 - RNA, 20 nt, Homo sapiens
acacagcuaacauccagucc

SEQ ID NO: 2761 - RNA, 20 nt, Homo sapiens
ccuuuauauuaaucgagaug

SEQ ID NO: 2762 - RNA, 20 nt, Homo sapiens
gucuucugacucgaggaagu

SEQ ID NO: 2763 - RNA, 20 nt, Homo sapiens
uuaccagaucaaugaacguc

SEQ ID NO: 2764 - RNA, 20 nt, Homo sapiens
aggguggcugaaucacggaa

SEQ ID NO: 2765 - RNA, 20 nt, Homo sapiens
ccuccguaggucugguguga

SEQ ID NO: 2766 - RNA, 20 nt, Homo sapiens
ggauagagcaguaagacagc

SEQ ID NO: 2767 - RNA, 20 nt, Homo sapiens
gaauuuccagcucccuccgu

SEQ ID NO: 2768 - RNA, 20 nt, Homo sapiens
guauaucaucucucugucau

SEQ ID NO: 2769 - RNA, 20 nt, Homo sapiens
aucccaggguggcugaauca

SEQ ID NO: 2770 - RNA, 20 nt, Homo sapiens
cuuuccagucuucugacucg

SEQ ID NO: 2771 - RNA, 20 nt, Homo sapiens
cgcaccaucaguaucccagc

SEQ ID NO: 2772 - RNA, 20 nt, Homo sapiens
ugacguucauugaucuggua

SEQ ID NO: 2773 - RNA, 20 nt, Homo sapiens
cuggugugagggcauuucga

SEQ ID NO: 2774 - RNA, 20 nt, Homo sapiens
gacucgaggaagugggaacc

SEQ ID NO: 2775 - RNA, 20 nt, Homo sapiens
acuuccucgagucagaagac

SEQ ID NO: 2776 - RNA, 20 nt, Homo sapiens
uccagcucccuccguagguc

SEQ ID NO: 2777 - RNA, 20 nt, Homo sapiens
augcccucacaccagaccua

SEQ ID NO: 2778 - RNA, 20 nt, Homo sapiens
auuccgugauucagccaccc

SEQ ID NO: 2779 - RNA, 20 nt, Homo sapiens
cccuccguaggucuggugug

SEQ ID NO: 2780 - RNA, 20 nt, Homo sapiens
gcaagauauuaucggcacag

SEQ ID NO: 2781 - RNA, 20 nt, Homo sapiens
ccuuauccuaccuuaacaug

SEQ ID NO: 2782 - RNA, 20 nt, Homo sapiens
uucacguuugagacccaaga

SEQ ID NO: 2783 - RNA, 20 nt, Homo sapiens
ucuugggucucaaacgugaa

SEQ ID NO: 2784 - RNA, 20 nt, Homo sapiens
uuuggcaaaacgucuucagg

SEQ ID NO: 2785 - RNA, 20 nt, Homo sapiens
cuugaugauucaaaaugcug

SEQ ID NO: 2786 - RNA, 20 nt, Homo sapiens
cagcaggaaucuaucagaga

SEQ ID NO: 2787 - RNA, 20 nt, Homo sapiens
gaugauucaaaaugcugggg

SEQ ID NO: 2788 - RNA, 20 nt, Homo sapiens
uucuugggucucaaacguga

SEQ ID NO: 2789 - RNA, 20 nt, Homo sapiens
uucucugauagauuccugcu

SEQ ID NO: 2790 - RNA, 20 nt, Homo sapiens
ccuggauaacaucacugaug

SEQ ID NO: 2791 - RNA, 20 nt, Homo sapiens
ucagccugaacagaaacaga

SEQ ID NO: 2792 - RNA, 20 nt, Homo sapiens
aguugauaagcaauacaaau

SEQ ID NO: 2793 - RNA, 20 nt, Homo sapiens
gucucuccucauguuaaggu

SEQ ID NO: 2794 - RNA, 20 nt, Homo sapiens
cuucucugauagauuccugc

SEQ ID NO: 2795 - RNA, 20 nt, Homo sapiens
gccugaacagaaacagaugg

SEQ ID NO: 2796 - RNA, 20 nt, Homo sapiens
caacuucugaaaaauacgaa

SEQ ID NO: 2797 - RNA, 20 nt, Homo sapiens
ccuugaugauucaaaaugcu

SEQ ID NO: 2798 - RNA, 20 nt, Homo sapiens
gaagcgcuguuugccaguua

SEQ ID NO: 2799 - RNA, 20 nt, Homo sapiens
uuauaauagcaagauauuau

SEQ ID NO: 2800 - RNA, 20 nt, Homo sapiens
ggagauguuucaugcuacag

SEQ ID NO: 2801 - RNA, 20 nt, Homo sapiens
uuugcuuucaguaccauaac

SEQ ID NO: 2802 - RNA, 20 nt, Homo sapiens
ugcaguauguaguuugccug

SEQ ID NO: 2803 - RNA, 20 nt, Homo sapiens
agcaggaaucuaucagagaa

SEQ ID NO: 2804 - RNA, 20 nt, Homo sapiens
cucauuucagcuugacuuag

SEQ ID NO: 2805 - RNA, 20 nt, Homo sapiens
aaguuggaagugaauaugug

SEQ ID NO: 2806 - RNA, 20 nt, Homo sapiens
gugcugguccaucuugaccg

SEQ ID NO: 2807 - RNA, 20 nt, Homo sapiens
gucaagauggaccagcacag

SEQ ID NO: 2808 - RNA, 20 nt, Homo sapiens
gaccuaccugugcuacgaag

SEQ ID NO: 2809 - RNA, 20 nt, Homo sapiens
cuccacuucguagcacaggu

SEQ ID NO: 2810 - RNA, 20 nt, Homo sapiens
caauggcaccucggucaaga

SEQ ID NO: 2811 - RNA, 20 nt, Homo sapiens
acuuuaacaauggcauugga

SEQ ID NO: 2812 - RNA, 20 nt, Homo sapiens
caggggcuuucuacacaacc

SEQ ID NO: 2813 - RNA, 20 nt, Homo sapiens
ggucaagauggaccagcaca

SEQ ID NO: 2814 - RNA, 20 nt, Homo sapiens
gcgccuggacaauggcaccu

SEQ ID NO: 2815 - RNA, 20 nt, Homo sapiens
uaggcuaagaaucuucucug

SEQ ID NO: 2816 - RNA, 20 nt, Homo sapiens
ggacccggcccagaucuaca

SEQ ID NO: 2817 - RNA, 20 nt, Homo sapiens
ggggucguaaucauagaugc

SEQ ID NO: 2818 - RNA, 20 nt, Homo sapiens
agaagcgcagcuccgcaugg

SEQ ID NO: 2819 - RNA, 20 nt, Homo sapiens
ugaccgaggugccauugucc

SEQ ID NO: 2820 - RNA, 20 nt, Homo sapiens
gggggucguaaucauagaug

SEQ ID NO: 2821 - RNA, 20 nt, Homo sapiens
uccaacuuuaacaauggcau

SEQ ID NO: 2822 - RNA, 20 nt, Homo sapiens
uguguagaaagccccugugc

SEQ ID NO: 2823 - RNA, 20 nt, Homo sapiens
uucacuuccaacuuuaacaa

SEQ ID NO: 2824 - RNA, 20 nt, Homo sapiens
cggucaagauggaccagcac

SEQ ID NO: 2825 - DNA, 20 bp, Homo sapiens
gcacagccccaggagaagca

SEQ ID NO: 2826 - RNA, 20 nt, Homo sapiens
gugcuacgaaguggagcgcc

SEQ ID NO: 2827 - RNA, 20 nt, Homo sapiens
ucacguguguguucuccuga

SEQ ID NO: 2828 - RNA, 20 nt, Homo sapiens
ggcgcuccacuucguagcac

SEQ ID NO: 2829 - RNA, 20 nt, Homo sapiens
ccaacugcaaagaaggaacc

SEQ ID NO: 2830 - RNA, 20 nt, Homo sapiens
cuccaccucauagcacaagu

SEQ ID NO: 2831 - RNA, 20 nt, Homo sapiens
auaguccaugaucgucacgc

SEQ ID NO: 2832 - RNA, 20 nt, Homo sapiens
caugggcuuucuaugcaacg

SEQ ID NO: 2833 - RNA, 20 nt, Homo sapiens
guccugauggaccagcacau

SEQ ID NO: 2834 - RNA, 20 nt, Homo sapiens
ggcgccgucgaaggaccaaa

SEQ ID NO: 2835 - RNA, 20 nt, Homo sapiens
augacccuuugguccuucga

SEQ ID NO: 2836 - RNA, 20 nt, Homo sapiens
cauaguccaugaucgucacg

SEQ ID NO: 2837 - RNA, 20 nt, Homo sapiens
cugaggcuugaaauacaccu

SEQ ID NO: 2838 - RNA, 20 nt, Homo sapiens
cuggauccaucagguaucug

SEQ ID NO: 2839 - RNA, 20 nt, Homo sapiens
cugggaaagagauuaccgaa

SEQ ID NO: 2840 - RNA, 20 nt, Homo sapiens
ugaaugugucuggauccauc

SEQ ID NO: 2841 - RNA, 20 nt, Homo sapiens
ccagaccuacuugugcuaug

SEQ ID NO: 2842 - RNA, 20 nt, Homo sapiens
acugggaaagagauuaccga

SEQ ID NO: 2843 - RNA, 20 nt, Homo sapiens
agaggaagcacauuucugcg

SEQ ID NO: 2844 - RNA, 20 nt, Homo sapiens
gaccuacuugugcuaugagg

SEQ ID NO: 2845 - RNA, 20 nt, Homo sapiens
uaggcuaagaaucuucucug

SEQ ID NO: 2846 - RNA, 20 nt, Homo sapiens
ugcauagaaagcccaugugc

SEQ ID NO: 2847 - RNA, 20 nt, Homo sapiens
gugcugguccaucaggaccc

SEQ ID NO: 2848 - RNA, 20 nt, Homo sapiens
cuuuguccacagauaccuga

SEQ ID NO: 2849 - RNA, 20 nt, Homo sapiens
aggagcccgcgugacgauca

SEQ ID NO: 2850 - RNA, 20 nt, Homo sapiens
gcgccuggacaauggcaccu

SEQ ID NO: 2851 - RNA, 20 nt, Homo sapiens
ggggugcucagacaggaauu

SEQ ID NO: 2852 - RNA, 20 nt, Homo sapiens
aaggucagcaauucaugccu

SEQ ID NO: 2853 - RNA, 20 nt, Homo sapiens
aucuggaaacacuuguaagc

SEQ ID NO: 2854 - RNA, 20 nt, Homo sapiens
acgaacccauccucuauggu

SEQ ID NO: 2855 - RNA, 20 nt, Homo sapiens
gucuccuaacacaaaguacc

SEQ ID NO: 2856 - RNA, 20 nt, Homo sapiens
accuaugggaagccaacgau

SEQ ID NO: 2857 - RNA, 20 nt, Homo sapiens
aacuuggcugugcuucaccg

SEQ ID NO: 2858 - RNA, 20 nt, Homo sapiens
gcggcgcuuuauaccuucca

SEQ ID NO: 2859 - RNA, 20 nt, Homo sapiens
ucuuccaggagacaacugag

SEQ ID NO: 2860 - RNA, 20 nt, Homo sapiens
auggauacuggaaguaguag

SEQ ID NO: 2861 - RNA, 20 nt, Homo sapiens
gauacuggaaguaguagagg

SEQ ID NO: 2862 - RNA, 20 nt, Homo sapiens
acacaaaguaccaggucacc

SEQ ID NO: 2863 - RNA, 20 nt, Homo sapiens
uccgaucguuggcuucccau

SEQ ID NO: 2864 - RNA, 20 nt, Homo sapiens
aaugggucucagaauccacc

SEQ ID NO: 2865 - RNA, 20 nt, Homo sapiens
ucaguugucuccuggaagac

SEQ ID NO: 2866 - RNA, 20 nt, Homo sapiens
ccaaguuucguuccgaucgu

SEQ ID NO: 2867 - RNA, 20 nt, Homo sapiens
aagauguguaccaggugacc

SEQ ID NO: 2868 - RNA, 20 nt, Homo sapiens
ccaacgaucggaacgaaacu

SEQ ID NO: 2869 - RNA, 20 nt, Homo sapiens
ccccugcacagucugggcaa

SEQ ID NO: 2870 - RNA, 20 nt, Homo sapiens
cuggaaguaguagaggcggg

SEQ ID NO: 2871 - RNA, 20 nt, Homo sapiens
uggcugugcuucaccgugga

SEQ ID NO: 2872 - RNA, 20 nt, Homo sapiens
aauuggaaguagaaugugcc

SEQ ID NO: 2873 - RNA, 20 nt, Homo sapiens
uugcccagacugugcagggg

SEQ ID NO: 2874 - RNA, 20 nt, Homo sapiens
agcgccgcucaguugucucc

SEQ ID NO: 2875 - RNA, 20 nt, Homo sapiens
agacccauugucaugcagaa

SEQ ID NO: 2876 - RNA, 20 nt, Homo sapiens
cuuccaauuuaaaaaccuau

SEQ ID NO: 2877 - RNA, 20 nt, Homo sapiens
acuuccaauuuaaaaaccua

SEQ ID NO: 2878 - RNA, 20 nt, Homo sapiens
ccaccuccccugcacagucu

SEQ ID NO: 2879 - RNA, 20 nt, Homo sapiens
gagauucacguugcugugcc

SEQ ID NO: 2880 - RNA, 20 nt, Homo sapiens
cucaaaccggaaauacaccu

SEQ ID NO: 2881 - RNA, 20 nt, Homo sapiens
auaguccaugaucuucacac

SEQ ID NO: 2882 - RNA, 20 nt, Homo sapiens
acuaccgggauagagauugg

SEQ ID NO: 2883 - RNA, 20 nt, Homo sapiens
ccgggauagagauuggcggu

SEQ ID NO: 2884 - RNA, 20 nt, Homo sapiens
uuggucaccuucaccacaca

SEQ ID NO: 2885 - RNA, 20 nt, Homo sapiens
acgucagucgaaucacaggc

SEQ ID NO: 2886 - RNA, 20 nt, Homo sapiens
ugcccucagaaacccgaugg

SEQ ID NO: 2887 - RNA, 20 nt, Homo sapiens
auaagaagcacauuucugcg

SEQ ID NO: 2888 - RNA, 20 nt, Homo sapiens
gggguuccaugauacaaacc

SEQ ID NO: 2889 - RNA, 20 nt, Homo sapiens
uccgaccacaggcuuucagu

SEQ ID NO: 2890 - RNA, 20 nt, Homo sapiens
aguggaaguagaauaugugu

SEQ ID NO: 2891 - RNA, 20 nt, Homo sapiens
aaaaaccuacugaaagccug

SEQ ID NO: 2892 - RNA, 20 nt, Homo sapiens
ucuuccggaagacagcugag

SEQ ID NO: 2893 - RNA, 20 nt, Homo sapiens
acugacguuuggguaguacc

SEQ ID NO: 2894 - RNA, 20 nt, Homo sapiens
ccaaacgucagucgaaucac

SEQ ID NO: 2895 - RNA, 20 nt, Homo sapiens
uugugcccucagaaacccga

SEQ ID NO: 2896 - RNA, 20 nt, Homo sapiens
accuacugaaagccuguggu

SEQ ID NO: 2897 - RNA, 20 nt, Homo sapiens
ucagucgaaucacaggcagg

SEQ ID NO: 2898 - RNA, 20 nt, Homo sapiens
agcgccuguuagcaggcagu

SEQ ID NO: 2899 - RNA, 20 nt, Homo sapiens
guggugcuuuguaacuucca

SEQ ID NO: 2900 - RNA, 20 nt, Homo sapiens
cauaguccaugaucuucaca

SEQ ID NO: 2901 - RNA, 20 nt, Homo sapiens
cccaccgccaaucucuaucc

SEQ ID NO: 2902 - RNA, 20 nt, Homo sapiens
uaugaagugaaaauaaagag

SEQ ID NO: 2903 - RNA, 20 nt, Homo sapiens
cucuaucccgguaguaguag

SEQ ID NO: 2904 - RNA, 20 nt, Homo sapiens
aauuuguaccaaggcaugaa

SEQ ID NO: 2905 - RNA, 20 nt, Homo sapiens
aucguccauaaucuucacgc

SEQ ID NO: 2906 - RNA, 20 nt, Homo sapiens
aagaucuuugcguccaaacg

SEQ ID NO: 2907 - RNA, 20 nt, Homo sapiens
accuacgcaaagccuauggu

SEQ ID NO: 2908 - RNA, 20 nt, Homo sapiens
guggugcuuuacaacuucca

SEQ ID NO: 2909 - RNA, 20 nt, Homo sapiens
gugaagauuauggacgauga

SEQ ID NO: 2910 - RNA, 20 nt, Homo sapiens
caucguccauaaucuucacg

SEQ ID NO: 2911 - RNA, 20 nt, Homo sapiens
aaaaaccuacgcaaagccua

SEQ ID NO: 2912 - RNA, 20 nt, Homo sapiens
cugggaaagagauuaccgaa

SEQ ID NO: 2913 - RNA, 20 nt, Homo sapiens
cucaggcugggaauacaccu

SEQ ID NO: 2914 - RNA, 20 nt, Homo sapiens
ugcguccaaacggggccuug

SEQ ID NO: 2915 - RNA, 20 nt, Homo sapiens
ucuuccaggagacaggugag

SEQ ID NO: 2916 - RNA, 20 nt, Homo sapiens
ccagcuuucguuccgaccau

SEQ ID NO: 2917 - RNA, 20 nt, Homo sapiens
aaguggaaguagaauaugug

SEQ ID NO: 2918 - RNA, 20 nt, Homo sapiens
gaaaacuuuguguacaguga

SEQ ID NO: 2919 - RNA, 20 nt, Homo sapiens
acugggaaagagauuaccga

SEQ ID NO: 2920 - RNA, 20 nt, Homo sapiens
augggucucaggauccaccu

SEQ ID NO: 2921 - RNA, 20 nt, Homo sapiens
uccgaccauaggcuuugcgu

SEQ ID NO: 2922 - RNA, 20 nt, Homo sapiens
ugccuucagaaacccgaugg

SEQ ID NO: 2923 - RNA, 20 nt, Homo sapiens
gcgggcggcggagaugguca

SEQ ID NO: 2924 - RNA, 20 nt, Homo sapiens
guauuccgacgagaaaggau

SEQ ID NO: 2925 - RNA, 20 nt, Homo sapiens
auagacccauccuuucucgu

SEQ ID NO: 2926 - RNA, 20 nt, Homo sapiens
ucaccugucuccuggaagag

SEQ ID NO: 2927 - RNA, 20 nt, Homo sapiens
agaggaagcacauuucugcg

SEQ ID NO: 2928 - RNA, 20 nt, Homo sapiens
ggggguccaggauacaaacc

SEQ ID NO: 2929 - RNA, 20 nt, Homo sapiens
aauuuguaccaaggcaugaa

SEQ ID NO: 2930 - RNA, 20 nt, Homo sapiens
cuuaaguucggaauacaccu

SEQ ID NO: 2931 - RNA, 20 nt, Homo sapiens
ugcgcuccaccucauaacac

SEQ ID NO: 2932 - RNA, 20 nt, Homo sapiens
ccccugcacaaaguguacaa

SEQ ID NO: 2933 - RNA, 20 nt, Homo sapiens
gcgcaugcacaaugacaccu

SEQ ID NO: 2934 - RNA, 20 nt, Homo sapiens
uauuuaggcagauuauucca

SEQ ID NO: 2935 - RNA, 20 nt, Homo sapiens
uucuaggcuccacauaaaca

SEQ ID NO: 2936 - RNA, 20 nt, Homo sapiens
augaucuucaugguggcacg

SEQ ID NO: 2937 - RNA, 20 nt, Homo sapiens
aagaucuuugcguccaaagg

SEQ ID NO: 2938 - RNA, 20 nt, Homo sapiens
uccuccacuugcugaaccag

SEQ ID NO: 2939 - RNA, 20 nt, Homo sapiens
ugagacuuaccuguguuaug

SEQ ID NO: 2940 - RNA, 20 nt, Homo sapiens
cgaaagaucuuugcguccaa

SEQ ID NO: 2941 - RNA, 20 nt, Homo sapiens
uauuacugcacaucaugcug

SEQ ID NO: 2942 - RNA, 20 nt, Homo sapiens
gccccugcacaaaguguaca

SEQ ID NO: 2943 - RNA, 20 nt, Homo sapiens
agcgcaugcacaaugacacc

SEQ ID NO: 2944 - RNA, 20 nt, Homo sapiens
aacaaugaaccuugggucag

SEQ ID NO: 2945 - RNA, 20 nt, Homo sapiens
gacuuaccuguguuaugagg

SEQ ID NO: 2946 - RNA, 20 nt, Homo sapiens
ggaagaaucucaucucuggg

SEQ ID NO: 2947 - RNA, 20 nt, Homo sapiens
augaagaucaugaauuauga

SEQ ID NO: 2948 - RNA, 20 nt, Homo sapiens
ugcauagaaagccccugcgc

SEQ ID NO: 2949 - RNA, 20 nt, Homo sapiens
ucaugccguccucugaccca

SEQ ID NO: 2950 - RNA, 20 nt, Homo sapiens
uccacugguucagcaagugg

SEQ ID NO: 2951 - RNA, 20 nt, Homo sapiens
auuacugcacaucaugcugg

SEQ ID NO: 2952 - RNA, 20 nt, Homo sapiens
cugggucccagaaguaguag

SEQ ID NO: 2953 - RNA, 20 nt, Homo sapiens
aaguugaaagugaauguggg

SEQ ID NO: 2954 - RNA, 20 nt, Homo sapiens
auagacccauccuuucucgu

SEQ ID NO: 2955 - RNA, 20 nt, Homo sapiens
aaggccuuacuacccgagga

SEQ ID NO: 2956 - RNA, 20 nt, Homo sapiens
gcucacgaccaucugaaccu

SEQ ID NO: 2957 - RNA, 20 nt, Homo sapiens
ucagaaggccuuacuacccg

SEQ ID NO: 2958 - RNA, 20 nt, Homo sapiens
aauggcuccacgcccacgag

SEQ ID NO: 2959 - RNA, 20 nt, Homo sapiens
aagucaccuguuaccucacg

SEQ ID NO: 2960 - RNA, 20 nt, Homo sapiens
acgugagguaacaggugacu

SEQ ID NO: 2961 - RNA, 20 nt, Homo sapiens
gcgucagcugguaacacaag

SEQ ID NO: 2962 - RNA, 20 nt, Homo sapiens
ucggguaguaaggccuucug

SEQ ID NO: 2963 - RNA, 20 nt, Homo sapiens
uaccagcugacgccgcagaa

SEQ ID NO: 2964 - RNA, 20 nt, Homo sapiens
ugcaccagugguaguacagg

SEQ ID NO: 2965 - RNA, 20 nt, Homo sapiens
gguaguaaggccuucugagg

SEQ ID NO: 2966 - RNA, 20 nt, Homo sapiens
uaauaaagcaaauuucugca

SEQ ID NO: 2967 - RNA, 20 nt, Homo sapiens
gugggcguggagccauucug

SEQ ID NO: 2968 - RNA, 20 nt, Homo sapiens
auuaacgagaucaaguccau

SEQ ID NO: 2969 - RNA, 20 nt, Homo sapiens
gagaggcuacuuugaaaaca

SEQ ID NO: 2970 - RNA, 20 nt, Homo sapiens
cgucagcugguaacacaaga

SEQ ID NO: 2971 - RNA, 20 nt, Homo sapiens
ccagugguaguacaggcggg

SEQ ID NO: 2972 - RNA, 20 nt, Homo sapiens
gcaccagugguaguacaggc

SEQ ID NO: 2973 - RNA, 20 nt, Homo sapiens
gaugaagucaaccagcuccc

SEQ ID NO: 2974 - RNA, 20 nt, Homo sapiens
acaacaagcgccgccucaga

SEQ ID NO: 2975 - RNA, 20 nt, Homo sapiens
ggagcugguugacuucauca

SEQ ID NO: 2976 - RNA, 20 nt, Homo sapiens
uaacacaagagggccuuccu

SEQ ID NO: 2977 - RNA, 20 nt, Homo sapiens
cugcguuucguccaguccca

SEQ ID NO: 2978 - RNA, 20 nt, Homo sapiens
ucugcuggggcuugcaccag

SEQ ID NO: 2979 - RNA, 20 nt, Homo sapiens
gcuuguuguuaaacuguaag

SEQ ID NO: 2980 - RNA, 20 nt, Homo sapiens
cacaggacacuuguacuggg

SEQ ID NO: 2981 - RNA, 20 nt, Homo sapiens
ccaaaagcuguacuaccaug

SEQ ID NO: 2982 - RNA, 20 nt, Homo sapiens
ugacguggacauuuacauug

SEQ ID NO: 2983 - RNA, 20 nt, Homo sapiens
aaucucaaagucuacgccgc

SEQ ID NO: 2984 - RNA, 20 nt, Homo sapiens
cuggacaaaguggacccugu

SEQ ID NO: 2985 - RNA, 20 nt, Homo sapiens
agacaugaggaaguggcgug

SEQ ID NO: 2986 - RNA, 20 nt, Homo sapiens
ugugcggcuggugauccgaa

SEQ ID NO: 2987 - RNA, 20 nt, Homo sapiens
gcagggaccggucagacaug

SEQ ID NO: 2988 - RNA, 20 nt, Homo sapiens
agaagaucaaagucucuggu

SEQ ID NO: 2989 - RNA, 20 nt, Homo sapiens
caggugagggucacaaacac

SEQ ID NO: 2990 - RNA, 20 nt, Homo sapiens
gagccacaggacacuuguac

SEQ ID NO: 2991 - RNA, 20 nt, Homo sapiens
acguggacauuuacauugag

SEQ ID NO: 2992 - RNA, 20 nt, Homo sapiens
cagggaagccucgaggugca

SEQ ID NO: 2993 - RNA, 20 nt, Homo sapiens
gacuaccugaaggaccgcaa

SEQ ID NO: 2994 - RNA, 20 nt, Homo sapiens
aggcccagaggauacaggaa

SEQ ID NO: 2995 - RNA, 20 nt, Homo sapiens
caguucgccccggagaaacc

SEQ ID NO: 2996 - RNA, 20 nt, Homo sapiens
cgcccaguacaaguguccug

SEQ ID NO: 2997 - RNA, 20 nt, Homo sapiens
gcgggacuucguagaucacc

SEQ ID NO: 2998 - RNA, 20 nt, Homo sapiens
accuuacagaauguggagcu

SEQ ID NO: 2999 - RNA, 20 nt, Homo sapiens
ugggagauaccuggucacug

SEQ ID NO: 3000 - RNA, 20 nt, Homo sapiens
ucaccguguacuugggcaag

SEQ ID NO: 3001 - RNA, 20 nt, Homo sapiens
cugaucccaggaacucugug

SEQ ID NO: 3002 - RNA, 20 nt, Homo sapiens
ggaagauucugggguaucug

SEQ ID NO: 3003 - RNA, 20 nt, Homo sapiens
gaugaacaggucuuugcgga

SEQ ID NO: 3004 - RNA, 20 nt, Homo sapiens
ccgguccugcaggcgggugg

SEQ ID NO: 3005 - RNA, 20 nt, Homo sapiens
aagucaacuucaaugucgga

SEQ ID NO: 3006 - RNA, 20 nt, Homo sapiens
cagcccaagauaguuaagug

SEQ ID NO: 3007 - RNA, 20 nt, Homo sapiens
caguaagucaacuucaaugu

SEQ ID NO: 3008 - RNA, 20 nt, Homo sapiens
cugaaucuuuggaguaccug

SEQ ID NO: 3009 - RNA, 20 nt, Homo sapiens
acaaagucacaugguucaca

SEQ ID NO: 3010 - RNA, 20 nt, Homo sapiens
acagcccaagauaguuaagu

SEQ ID NO: 3011 - RNA, 20 nt, Homo sapiens
ggccgagaugucucgcuccg

SEQ ID NO: 3012 - RNA, 20 nt, Homo sapiens
gaguagcgcgagcacagcua

SEQ ID NO: 3013 - RNA, 20 nt, Homo sapiens
uccugaauugcuaugugucu

SEQ ID NO: 3014 - RNA, 20 nt, Homo sapiens
acccagacacauagcaauuc

SEQ ID NO: 3015 - RNA, 20 nt, Homo sapiens
cucagguacuccaaagauuc

SEQ ID NO: 3016 - RNA, 20 nt, Homo sapiens
gaaguugacuuacugaagaa

SEQ ID NO: 3017 - RNA, 20 nt, Homo sapiens
acucucucuuucuggccugg

SEQ ID NO: 3018 - RNA, 20 nt, Homo sapiens
uucagacuugucuuucagca

SEQ ID NO: 3019 - RNA, 20 nt, Homo sapiens
acucacgcuggauagccucc

SEQ ID NO: 3020 - RNA, 20 nt, Homo sapiens
acuugucuuucagcaaggac

SEQ ID NO: 3021 - RNA, 20 nt, Homo sapiens
cgcgagcacagcuaaggcca

SEQ ID NO: 3022 - RNA, 20 nt, Homo sapiens
ucacgucauccagcagagaa

SEQ ID NO: 3023 - RNA, 20 nt, Homo sapiens
cgugaguaaaccugaaucuu

SEQ ID NO: 3024 - RNA, 20 nt, Homo sapiens
uggagagagaauugaaaaag

SEQ ID NO: 3025 - RNA, 20 nt, Homo sapiens
ggccacggagcgagacaucu

SEQ ID NO: 3026 - RNA, 20 nt, Homo sapiens
cucgcgcuacucucucuuuc

SEQ ID NO: 3027 - RNA, 20 nt, Homo sapiens
gcuacucucucuuucuggcc

SEQ ID NO: 3028 - RNA, 20 nt, Homo sapiens
uuccugaauugcuauguguc

SEQ ID NO: 3029 - RNA, 20 nt, Homo sapiens
uuugacuuuccauucucugc

SEQ ID NO: 3030 - RNA, 20 nt, Homo sapiens
gaacugacgucuaagcaagg

SEQ ID NO: 3031 - RNA, 20 nt, Homo sapiens
gauccacacaacaguacggu

SEQ ID NO: 3032 - RNA, 20 nt, Homo sapiens
ucgacauggcccaauucgag

SEQ ID NO: 3033 - RNA, 20 nt, Homo sapiens
ggaccaucaccaaacgaacc

SEQ ID NO: 3034 - RNA, 20 nt, Homo sapiens
caagaacugacgucuaagca

SEQ ID NO: 3035 - RNA, 20 nt, Homo sapiens
uuuagcagcacuaaugacug

SEQ ID NO: 3036 - RNA, 20 nt, Homo sapiens
ccacaacccagcgacaguca

SEQ ID NO: 3037 - RNA, 20 nt, Homo sapiens
agauccacacaacaguacgg

SEQ ID NO: 3038 - RNA, 20 nt, Homo sapiens
ucacccagcaaaucgauggg

SEQ ID NO: 3039 - RNA, 20 nt, Homo sapiens
gacaccgaaaccguuggaga

SEQ ID NO: 3040 - RNA, 20 nt, Homo sapiens
ggacuacacucaccaaacug

SEQ ID NO: 3041 - RNA, 20 nt, Homo sapiens
cucaugcgauucacuacucg

SEQ ID NO: 3042 - RNA, 20 nt, Homo sapiens
ggaaaacgugggaaguaccc

SEQ ID NO: 3043 - RNA, 20 nt, Homo sapiens
ccauccacaguaauucacgg

SEQ ID NO: 3044 - RNA, 20 nt, Homo sapiens
uugcugggugaaauuugugg

SEQ ID NO: 3045 - RNA, 20 nt, Homo sapiens
ugcucuuacaaacaccaagg

SEQ ID NO: 3046 - RNA, 20 nt, Homo sapiens
gacauauguguacgaacaca

SEQ ID NO: 3047 - RNA, 20 nt, Homo sapiens
ugacaccgaaaccguuggag

SEQ ID NO: 3048 - RNA, 20 nt, Homo sapiens
acaacaacccuggcaacccu

SEQ ID NO: 3049 - RNA, 20 nt, Homo sapiens
aggguugauggggaaaacgu

SEQ ID NO: 3050 - RNA, 20 nt, Homo sapiens
guuauugacaccgaaaccgu

SEQ ID NO: 3051 - RNA, 20 nt, Homo sapiens
ggcaucacuaccaucaagcu

SEQ ID NO: 3052 - RNA, 20 nt, Homo sapiens
cacauauagacacuuaccug

SEQ ID NO: 3053 - RNA, 20 nt, Homo sapiens
uggcuacagugauggaaugc

SEQ ID NO: 3054 - RNA, 20 nt, Homo sapiens
ggacucaacuacaacuuguu

SEQ ID NO: 3055 - RNA, 20 nt, Homo sapiens
ccaccacaaugugacacggu

SEQ ID NO: 3056 - RNA, 20 nt, Homo sapiens
uccaccacaaugugacacgg

SEQ ID NO: 3057 - RNA, 20 nt, Homo sapiens
ccucauaaauguuuauacgg

SEQ ID NO: 3058 - RNA, 20 nt, Homo sapiens
auggaggugagucaccucaa

SEQ ID NO: 3059 - RNA, 20 nt, Homo sapiens
cccaccgugucacauugugg

SEQ ID NO: 3060 - RNA, 20 nt, Homo sapiens
ugguccaccacaaugugaca

SEQ ID NO: 3061 - RNA, 20 nt, Homo sapiens
ggguccagcgaaggaccgca

SEQ ID NO: 3062 - RNA, 20 nt, Homo sapiens
gaucguuaccucaagggagu

SEQ ID NO: 3063 - RNA, 20 nt, Homo sapiens
ccagccgggccaacaccgug

SEQ ID NO: 3064 - RNA, 20 nt, Homo sapiens
uguccaguagucgugugaug

SEQ ID NO: 3065 - RNA, 20 nt, Homo sapiens
ugacucaccuccaucagacu

SEQ ID NO: 3066 - RNA, 20 nt, Homo sapiens
auuagccgaucguuaccuca

SEQ ID NO: 3067 - RNA, 20 nt, Homo sapiens
acgcgggaggacgccgcuca

SEQ ID NO: 3068 - RNA, 20 nt, Homo sapiens
cgucauuccggacuacaugc

SEQ ID NO: 3069 - RNA, 20 nt, Homo sapiens
ccgucauuccggacuacaug

SEQ ID NO: 3070 - RNA, 20 nt, Homo sapiens
ccaucagacucggacccacc

SEQ ID NO: 3071 - RNA, 20 nt, Homo sapiens
uuucccaccgugucacauug

SEQ ID NO: 3072 - RNA, 20 nt, Homo sapiens
gauacucaagaccagugcug

SEQ ID NO: 3073 - RNA, 20 nt, Homo sapiens
gguggguccgagucugaugg

SEQ ID NO: 3074 - RNA, 20 nt, Homo sapiens
uuagccgaucguuaccucaa

SEQ ID NO: 3075 - RNA, 20 nt, Homo sapiens
aaacuaugggcuagccauug

SEQ ID NO: 3076 - RNA, 20 nt, Homo sapiens
gaagagacugaccuucgugg

SEQ ID NO: 3077 - RNA, 20 nt, Homo sapiens
uucgugguggaagcuccuca

SEQ ID NO: 3078 - RNA, 20 nt, Homo sapiens
cacucccuugagguaacgau

SEQ ID NO: 3079 - RNA, 20 nt, Homo sapiens
gaagagccgaagcucugcag

SEQ ID NO: 3080 - RNA, 20 nt, Homo sapiens
gguucggucaguccgugaag

SEQ ID NO: 3081 - RNA, 20 nt, Homo sapiens
gaacgccagagucucaagcg

SEQ ID NO: 3082 - RNA, 20 nt, Homo sapiens
cguaaucgcgcucaccaagc

SEQ ID NO: 3083 - RNA, 20 nt, Homo sapiens
gcgguucggucaguccguga

SEQ ID NO: 3084 - RNA, 20 nt, Homo sapiens
gauuacgucaguaccacagg

SEQ ID NO: 3085 - RNA, 20 nt, Homo sapiens
ccagagucucaagcgcgguu

SEQ ID NO: 3086 - RNA, 20 nt, Homo sapiens
aggucaggcagcucgaaaca

SEQ ID NO: 3087 - RNA, 20 nt, Homo sapiens
acggagaaggugaccaccug

SEQ ID NO: 3088 - RNA, 20 nt, Homo sapiens
cgcgauuacgucaguaccac

SEQ ID NO: 3089 - RNA, 20 nt, Homo sapiens
agcucgaaacaugguacucc

SEQ ID NO: 3090 - RNA, 20 nt, Homo sapiens
gagcugccugaccuagcagc

SEQ ID NO: 3091 - RNA, 20 nt, Homo sapiens
cgguucggucaguccgugaa

SEQ ID NO: 3092 - RNA, 20 nt, Homo sapiens
guccgugaaggggcuucuca

SEQ ID NO: 3093 - RNA, 20 nt, Homo sapiens
cucaccaagcaggugcugaa

SEQ ID NO: 3094 - RNA, 20 nt, Homo sapiens
ccgaaccgcgcuugagacuc

SEQ ID NO: 3095 - RNA, 20 nt, Homo sapiens
gaaggggcuucucacggaga

SEQ ID NO: 3096 - RNA, 20 nt, Homo sapiens
gaaaggcucccggagcuccg

SEQ ID NO: 3097 - RNA, 20 nt, Homo sapiens
uacaucuucugagugcaaga

SEQ ID NO: 3098 - RNA, 20 nt, Homo sapiens
cuccgugagaagccccuuca

SEQ ID NO: 3099 - RNA, 20 nt, Homo sapiens
ugucuuccagcugcuagguc

SEQ ID NO: 3100 - RNA, 20 nt, Homo sapiens
agcaggugcugaaaggcucc

SEQ ID NO: 3101 - RNA, 20 nt, Homo sapiens
uccagcucaccucggagcuc

SEQ ID NO: 3102 - RNA, 20 nt, Homo sapiens
ggagccuuucagcaccugcu

SEQ ID NO: 3103 - RNA, 20 nt, Homo sapiens
ccagcucaccucggagcucc

SEQ ID NO: 3104 - RNA, 20 nt, Homo sapiens
agugcaagauggcaucuucc

SEQ ID NO: 3105 - RNA, 20 nt, Homo sapiens
gagucugcgaggaucgcccg

SEQ ID NO: 3106 - RNA, 20 nt, Homo sapiens
cgaugggaccgagauccacg

SEQ ID NO: 3107 - RNA, 20 nt, Homo sapiens
cuggaugcggagucuacgau

SEQ ID NO: 3108 - RNA, 20 nt, Homo sapiens
cgguaggagcacguuugccg

SEQ ID NO: 3109 - RNA, 20 nt, Homo sapiens
cacggcuguacacacccgau

SEQ ID NO: 3110 - RNA, 20 nt, Homo sapiens
acgugauugaccacaccaag

SEQ ID NO: 3111 - RNA, 20 nt, Homo sapiens
caccugcucucgccuucgga

SEQ ID NO: 3112 - RNA, 20 nt, Homo sapiens
cacgugauugaccacaccaa

SEQ ID NO: 3113 - RNA, 20 nt, Homo sapiens
gggaaggcguccgaccgccg

SEQ ID NO: 3114 - RNA, 20 nt, Homo sapiens
gcacgugauugaccacacca

SEQ ID NO: 3115 - RNA, 20 nt, Homo sapiens
ggaaggcguccgaccgccgg

SEQ ID NO: 3116 - RNA, 20 nt, Homo sapiens
ucuggaugcggagucuacga

SEQ ID NO: 3117 - RNA, 20 nt, Homo sapiens
cuugcaaucuuucccgucca

SEQ ID NO: 3118 - RNA, 20 nt, Homo sapiens
ccguggcaaaaucacagacc

SEQ ID NO: 3119 - RNA, 20 nt, Homo sapiens
ggacuuacgccgaggccucg

SEQ ID NO: 3120 - RNA, 20 nt, Homo sapiens
cguggacgggaaagauugca

SEQ ID NO: 3121 - RNA, 20 nt, Homo sapiens
gccccugaggacuuacgccg

SEQ ID NO: 3122 - RNA, 20 nt, Homo sapiens
uccacucaccagcgcgaccc

SEQ ID NO: 3123 - RNA, 20 nt, Homo sapiens
acgggcgauccucgcagacu

SEQ ID NO: 3124 - RNA, 20 nt, Homo sapiens
cguccgaccgccgggggaca

SEQ ID NO: 3125 - RNA, 20 nt, Homo sapiens
ggagcacguuugccguggac

SEQ ID NO: 3126 - RNA, 20 nt, Homo sapiens
caucaugguuggcugcacug

SEQ ID NO: 3127 - RNA, 20 nt, Homo sapiens
agccguccgaaggcgagagc

SEQ ID NO: 3128 - RNA, 20 nt, Homo sapiens
aaagauggcagcaucauggu

SEQ ID NO: 3129 - RNA, 20 nt, Homo sapiens
ggacgucaggagcaaagauc

SEQ ID NO: 3130 - RNA, 20 nt, Homo sapiens
gagucugcgaggaucgcccg

SEQ ID NO: 3131 - RNA, 20 nt, Homo sapiens
cgaugggaccgagauccacg

SEQ ID NO: 3132 - RNA, 20 nt, Homo sapiens
cuggaugcggagucuacgau

SEQ ID NO: 3133 - RNA, 20 nt, Homo sapiens
cgguaggagcacguuugccg

SEQ ID NO: 3134 - RNA, 20 nt, Homo sapiens
cacggcuguacacacccgau

SEQ ID NO: 3135 - RNA, 20 nt, Homo sapiens
acgugauugaccacaccaag

SEQ ID NO: 3136 - RNA, 20 nt, Homo sapiens
caccugcucucgccuucgga

SEQ ID NO: 3137 - RNA, 20 nt, Homo sapiens
cacgugauugaccacaccaa

SEQ ID NO: 3138 - RNA, 20 nt, Homo sapiens
gggaaggcguccgaccgccg

SEQ ID NO: 3139 - RNA, 20 nt, Homo sapiens
gcacgugauugaccacacca

SEQ ID NO: 3140 - RNA, 20 nt, Homo sapiens
ggaaggcguccgaccgccgg

SEQ ID NO: 3141 - RNA, 20 nt, Homo sapiens
ucuggaugcggagucuacga

SEQ ID NO: 3142 - RNA, 20 nt, Homo sapiens
cuugcaaucuuucccgucca

SEQ ID NO: 3143 - RNA, 20 nt, Homo sapiens
ccguggcaaaaucacagacc

SEQ ID NO: 3144 - RNA, 20 nt, Homo sapiens
ggacuuacgccgaggccucg

SEQ ID NO: 3145 - RNA, 20 nt, Homo sapiens
cguggacgggaaagauugca

SEQ ID NO: 3146 - RNA, 20 nt, Homo sapiens
gccccugaggacuuacgccg

SEQ ID NO: 3147 - RNA, 20 nt, Homo sapiens
uccacucaccagcgcgaccc

SEQ ID NO: 3148 - RNA, 20 nt, Homo sapiens
acgggcgauccucgcagacu

SEQ ID NO: 3149 - RNA, 20 nt, Homo sapiens
cguccgaccgccgggggaca

SEQ ID NO: 3150 - RNA, 20 nt, Homo sapiens
ggagcacguuugccguggac

SEQ ID NO: 3151 - RNA, 20 nt, Homo sapiens
caucaugguuggcugcacug

SEQ ID NO: 3152 - RNA, 20 nt, Homo sapiens
agccguccgaaggcgagagc

SEQ ID NO: 3153 - RNA, 20 nt, Homo sapiens
aaagauggcagcaucauggu

SEQ ID NO: 3154 - RNA, 20 nt, Homo sapiens
ggacgucaggagcaaagauc

SEQ ID NO: 3155 - RNA, 20 nt, Homo sapiens
uaaugagagcaagacgugug

SEQ ID NO: 3156 - RNA, 20 nt, Homo sapiens
aaggauauggaaacaaaagu

SEQ ID NO: 3157 - RNA, 20 nt, Homo sapiens
uaccaugagacaugaacacc

SEQ ID NO: 3158 - RNA, 20 nt, Homo sapiens
cuuaauaugcaagacucuca

SEQ ID NO: 3159 - RNA, 20 nt, Homo sapiens
auggaaacaaaagucggcag

SEQ ID NO: 3160 - RNA, 20 nt, Homo sapiens
ggacaugacuacagagcugg

SEQ ID NO: 3161 - RNA, 20 nt, Homo sapiens
ggagcugagguugacaucac

SEQ ID NO: 3162 - RNA, 20 nt, Homo sapiens
acagacaagggugcugaaca

SEQ ID NO: 3163 - RNA, 20 nt, Homo sapiens
ccacauccucaggcucagaa

SEQ ID NO: 3164 - RNA, 20 nt, Homo sapiens
gcucccuagaagaagcucaa

SEQ ID NO: 3165 - RNA, 20 nt, Homo sapiens
aagaagacaguuaccuggca

SEQ ID NO: 3166 - RNA, 20 nt, Homo sapiens
ucaggacaugacuacagagc

SEQ ID NO: 3167 - RNA, 20 nt, Homo sapiens
cagaggucuugugcucuggg

SEQ ID NO: 3168 - RNA, 20 nt, Homo sapiens
uccuagaagaacuggagcug

SEQ ID NO: 3169 - RNA, 20 nt, Homo sapiens
ccagcuaugcccacauccuc

SEQ ID NO: 3170 - RNA, 20 nt, Homo sapiens
caaugcugcuacaaaaucug

SEQ ID NO: 3171 - RNA, 20 nt, Homo sapiens
gacauucccuucugagccug

SEQ ID NO: 3172 - RNA, 20 nt, Homo sapiens
uauccuuugagcuucuucua

SEQ ID NO: 3173 - RNA, 20 nt, Homo sapiens
uuccugguguucaugucuca

SEQ ID NO: 3174 - RNA, 20 nt, Homo sapiens
gaaaaaaaaucucacugcuu

SEQ ID NO: 3175 - RNA, 20 nt, Homo sapiens
ggguuguccugcacugccug

SEQ ID NO: 3176 - RNA, 20 nt, Homo sapiens
ccuucugagccugaggaugu

SEQ ID NO: 3177 - RNA, 20 nt, Homo sapiens
guucaugucucaugguauuc

SEQ ID NO: 3178 - RNA, 20 nt, Homo sapiens
uaacggagucaaucaaagcu

SEQ ID NO: 3179 - RNA, 20 nt, Homo sapiens
gcauugaguuguaguauauc

SEQ ID NO: 3180 - RNA, 20 nt, Homo sapiens
aaggaguauuucuacaccag

SEQ ID NO: 3181 - RNA, 20 nt, Homo sapiens
gcaauguaggcaaagcagca

SEQ ID NO: 3182 - RNA, 20 nt, Homo sapiens
guagaaauacuccuugaugu

SEQ ID NO: 3183 - RNA, 20 nt, Homo sapiens
uacuccuugaugugggcacg

SEQ ID NO: 3184 - RNA, 20 nt, Homo sapiens
ucaagaccaggacuuacaug

SEQ ID NO: 3185 - RNA, 20 nt, Homo sapiens
uguagaaauacuccuugaug

SEQ ID NO: 3186 - RNA, 20 nt, Homo sapiens
aauacuccuugaugugggca

SEQ ID NO: 3187 - RNA, 20 nt, Homo sapiens
gacucacacgacugcugggu

SEQ ID NO: 3188 - RNA, 20 nt, Homo sapiens
cgcagagggcaguagcaaug

SEQ ID NO: 3189 - RNA, 20 nt, Homo sapiens
agcaaugaggaugacagcga

SEQ ID NO: 3190 - RNA, 20 nt, Homo sapiens
ggugugguguccgaggaauc

SEQ ID NO: 3191 - RNA, 20 nt, Homo sapiens
agaccaggacuuacaugggg

SEQ ID NO: 3192 - RNA, 20 nt, Homo sapiens
acugccccgugcccacauca

SEQ ID NO: 3193 - RNA, 20 nt, Homo sapiens
ugaugugggcacggggcagu

SEQ ID NO: 3194 - RNA, 20 nt, Homo sapiens
uagcaaugaggaugacagcg

SEQ ID NO: 3195 - RNA, 20 nt, Homo sapiens
gggcagugggcgggcaaugu

SEQ ID NO: 3196 - RNA, 20 nt, Homo sapiens
aggcagaugcaggagcgcag

SEQ ID NO: 3197 - RNA, 20 nt, Homo sapiens
gaugacagcgagggcugccg

SEQ ID NO: 3198 - RNA, 20 nt, Homo sapiens
gcagcagggugugguguccg

SEQ ID NO: 3199 - RNA, 20 nt, Homo sapiens
guaggcaaagcagcagggug

SEQ ID NO: 3200 - RNA, 20 nt, Homo sapiens
cuuuccucuuccagauuccu

SEQ ID NO: 3201 - RNA, 20 nt, Homo sapiens
ggcaauguaggcaaagcagc

SEQ ID NO: 3202 - RNA, 20 nt, Homo sapiens
uugaugugggcacggggcag

SEQ ID NO: 3203 - RNA, 20 nt, Homo sapiens
auacuccuugaugugggcac

SEQ ID NO: 3204 - RNA, 20 nt, Homo sapiens
uggguuggagcacuugccac

SEQ ID NO: 3205 - RNA, 20 nt, Homo sapiens
ugguaggucccacugugcaa

SEQ ID NO: 3206 - RNA, 20 nt, Homo sapiens
caagucacaccguugcacag

SEQ ID NO: 3207 - RNA, 20 nt, Homo sapiens
ucuggcuucuggcacaacac

SEQ ID NO: 3208 - RNA, 20 nt, Homo sapiens
aagucacaccguugcacagu

SEQ ID NO: 3209 - RNA, 20 nt, Homo sapiens
cuggugauguuaaugcaucc

SEQ ID NO: 3210 - RNA, 20 nt, Homo sapiens
ggacauccagucugguggug

SEQ ID NO: 3211 - RNA, 20 nt, Homo sapiens
ucaccaacaccaucuauccc

SEQ ID NO: 3212 - RNA, 20 nt, Homo sapiens
auuguggacauccagucugg

SEQ ID NO: 3213 - RNA, 20 nt, Homo sapiens
gcuucuggcacaacacuggu

SEQ ID NO: 3214 - RNA, 20 nt, Homo sapiens
uaaacuuaaucuguacugua

SEQ ID NO: 3215 - RNA, 20 nt, Homo sapiens
gcaauuguggacauccaguc

SEQ ID NO: 3216 - RNA, 20 nt, Homo sapiens
gauccugggauagauggugu

SEQ ID NO: 3217 - RNA, 20 nt, Homo sapiens
cacugugcaacggugugacu

SEQ ID NO: 3218 - RNA, 20 nt, Homo sapiens
caacggugugacuuggcuua

SEQ ID NO: 3219 - RNA, 20 nt, Homo sapiens
ugagacuuaaaagggauccu

SEQ ID NO: 3220 - RNA, 20 nt, Homo sapiens
guuuagucgcguuccuuccu

SEQ ID NO: 3221 - RNA, 20 nt, Homo sapiens
ugugccagaagccagaaguc

SEQ ID NO: 3222 - RNA, 20 nt, Homo sapiens
gaaggcggauaccugacuuc

SEQ ID NO: 3223 - RNA, 20 nt, Homo sapiens
guccacaauugccagcagga

SEQ ID NO: 3224 - RNA, 20 nt, Homo sapiens
cugagacuuaaaagggaucc

SEQ ID NO: 3225 - RNA, 20 nt, Homo sapiens
auaagaaagaagaggcugag

SEQ ID NO: 3226 - RNA, 20 nt, Homo sapiens
aauugccagcaggauggcca

SEQ ID NO: 3227 - RNA, 20 nt, Homo sapiens
uguauggcauaagaaagaag

SEQ ID NO: 3228 - RNA, 20 nt, Homo sapiens
cauaagaaagaagaggcuga

SEQ ID NO: 3229 - RNA, 20 nt, Homo sapiens
gucuauccucaccaccagac

SEQ ID NO: 3230 - RNA, 20 nt, Homo sapiens
acgcaccgaauaguuacggu

SEQ ID NO: 3231 - RNA, 20 nt, Homo sapiens
caccgaauaguuacggucgg

SEQ ID NO: 3232 - RNA, 20 nt, Homo sapiens
cgggucgggugagaguggcg

SEQ ID NO: 3233 - RNA, 20 nt, Homo sapiens
gugcacgggucgggugagag

SEQ ID NO: 3234 - RNA, 20 nt, Homo sapiens
guggccagccagucagccga

SEQ ID NO: 3235 - RNA, 20 nt, Homo sapiens
ggucggaggccgauccaggu

SEQ ID NO: 3236 - RNA, 20 nt, Homo sapiens
gaugaugggcagcgcccgag

SEQ ID NO: 3237 - RNA, 20 nt, Homo sapiens
gcaccuccucuacccgaccc

SEQ ID NO: 3238 - RNA, 20 nt, Homo sapiens
cgugcacgacgcugcccggg

SEQ ID NO: 3239 - RNA, 20 nt, Homo sapiens
cucuacccgaccccgggccg

SEQ ID NO: 3240 - RNA, 20 nt, Homo sapiens
gggcagcgucgugcacgggu

SEQ ID NO: 3241 - RNA, 20 nt, Homo sapiens
cccaacgcaccgaauaguua

SEQ ID NO: 3242 - RNA, 20 nt, Homo sapiens
gaugggcagcgcccgagugg

SEQ ID NO: 3243 - RNA, 20 nt, Homo sapiens
gugcacgacgcugcccggga

SEQ ID NO: 3244 - RNA, 20 nt, Homo sapiens
gacccucuacccaccuggau

SEQ ID NO: 3245 - RNA, 20 nt, Homo sapiens
ggcccggggucggguagagg

SEQ ID NO: 3246 - RNA, 20 nt, Homo sapiens
ggcagcgucgugcacggguc

SEQ ID NO: 3247 - RNA, 20 nt, Homo sapiens
guggcggggucggcgcaguu

SEQ ID NO: 3248 - RNA, 20 nt, Homo sapiens
ucccgggcagcgucgugcac

SEQ ID NO: 3249 - RNA, 20 nt, Homo sapiens
cacgggucgggugagagugg

SEQ ID NO: 3250 - RNA, 20 nt, Homo sapiens
ggccuccgaccguaacuauu

SEQ ID NO: 3251 - RNA, 20 nt, Homo sapiens
caccuccucuacccgacccc

SEQ ID NO: 3252 - RNA, 20 nt, Homo sapiens
gcugcugcugcuccacggcg

SEQ ID NO: 3253 - RNA, 20 nt, Homo sapiens
ggaggugcgggcgcugcugg

SEQ ID NO: 3254 - RNA, 20 nt, Homo sapiens
cacgcugguggugcugcacc

SEQ ID NO: 3255 - RNA, 20 nt, Homo sapiens
uauugucugagugguaacgg

SEQ ID NO: 3256 - RNA, 20 nt, Homo sapiens
acaauagcaccaaggcagcg

SEQ ID NO: 3257 - RNA, 20 nt, Homo sapiens
gugguaacgguggaugcugu

SEQ ID NO: 3258 - RNA, 20 nt, Homo sapiens
caauagcaccaaggcagcgu

SEQ ID NO: 3259 - RNA, 20 nt, Homo sapiens
ccacucagacaauagcacca

SEQ ID NO: 3260 - RNA, 20 nt, Homo sapiens
uguacucacaaaugacugga

SEQ ID NO: 3261 - RNA, 20 nt, Homo sapiens
agccacauacucauucagcu

SEQ ID NO: 3262 - RNA, 20 nt, Homo sapiens
cugcugauccacaacaacuu

SEQ ID NO: 3263 - RNA, 20 nt, Homo sapiens
cugaaugaguauguggcuaa

SEQ ID NO: 3264 - RNA, 20 nt, Homo sapiens
uucauauacaaagagcagga

SEQ ID NO: 3265 - RNA, 20 nt, Homo sapiens
gcucuuuguauaugaacaga

SEQ ID NO: 3266 - RNA, 20 nt, Homo sapiens
caccuguacucacaaaugac

SEQ ID NO: 3267 - RNA, 20 nt, Homo sapiens
ccuuggugcuauugucugag

SEQ ID NO: 3268 - RNA, 20 nt, Homo sapiens
aaacacauugcccagcguga

SEQ ID NO: 3269 - RNA, 20 nt, Homo sapiens
acauugcccagcgugaggga

SEQ ID NO: 3270 - RNA, 20 nt, Homo sapiens
agagcacuccgaaguuguug

SEQ ID NO: 3271 - RNA, 20 nt, Homo sapiens
cacauugcccagcgugaggg

SEQ ID NO: 3272 - RNA, 20 nt, Homo sapiens
ucuguucauauacaaagagc

SEQ ID NO: 3273 - RNA, 20 nt, Homo sapiens
cagcagcaggaugaagaacu

SEQ ID NO: 3274 - RNA, 20 nt, Homo sapiens
gcugauuauccuccuugcug

SEQ ID NO: 3275 - RNA, 20 nt, Homo sapiens
caaacacauugcccagcgug

SEQ ID NO: 3276 - RNA, 20 nt, Homo sapiens
gggcaauguguuugucaucg

SEQ ID NO: 3277 - RNA, 20 nt, Homo sapiens
caucgugggcucuauuauca

SEQ ID NO: 3278 - RNA, 20 nt, Homo sapiens
gauucuuccuuucagaucug

SEQ ID NO: 3279 - RNA, 20 nt, Homo sapiens
ccuccuugcugaggugaccu

SEQ ID NO: 3280 - RNA, 20 nt, Homo sapiens
acaccaccugaagugacucg

SEQ ID NO: 3281 - RNA, 20 nt, Homo sapiens
ugguauuggaauaacucaca

SEQ ID NO: 3282 - RNA, 20 nt, Homo sapiens
ucuuccaucaacucauggca

SEQ ID NO: 3283 - RNA, 20 nt, Homo sapiens
augguauuggaauaacucac

SEQ ID NO: 3284 - RNA, 20 nt, Homo sapiens
ugcaguaaguacuauuccac

SEQ ID NO: 3285 - RNA, 20 nt, Homo sapiens
cuuacugcaaugcucgcugg

SEQ ID NO: 3286 - RNA, 20 nt, Homo sapiens
gcugucaggaguauucugac

SEQ ID NO: 3287 - RNA, 20 nt, Homo sapiens
ccaacccagugacagcuguc

SEQ ID NO: 3288 - RNA, 20 nt, Homo sapiens
aaaaucgauucugcuccucu

SEQ ID NO: 3289 - RNA, 20 nt, Homo sapiens
aggccccgagucacuucagg

SEQ ID NO: 3290 - RNA, 20 nt, Homo sapiens
aagauaauucaguuaccuag

SEQ ID NO: 3291 - RNA, 20 nt, Homo sapiens
uacaacaaaccccucaagaa

SEQ ID NO: 3292 - RNA, 20 nt, Homo sapiens
aaaaaacauaccucaacccu

SEQ ID NO: 3293 - RNA, 20 nt, Homo sapiens
ggugugucagagucucccag

SEQ ID NO: 3294 - RNA, 20 nt, Homo sapiens
uuucuggaguacuguagugg

SEQ ID NO: 3295 - RNA, 20 nt, Homo sapiens
cuuccaucaacucauggcag

SEQ ID NO: 3296 - RNA, 20 nt, Homo sapiens
uucuuccaucaacucauggc

SEQ ID NO: 3297 - RNA, 20 nt, Homo sapiens
cacaccaccugaagugacuc

SEQ ID NO: 3298 - RNA, 20 nt, Homo sapiens
gagauucuuccaucaacuca

SEQ ID NO: 3299 - RNA, 20 nt, Homo sapiens
uuauuucuggaguacuguag

SEQ ID NO: 3300 - RNA, 20 nt, Homo sapiens
agaaguucuggagcaacaua

SEQ ID NO: 3301 - RNA, 20 nt, Homo sapiens
uuggcuuggcaacaguauuu

SEQ ID NO: 3302 - RNA, 20 nt, Homo sapiens
aaucuucuguuggaugaaag

SEQ ID NO: 3303 - RNA, 20 nt, Homo sapiens
ggaaugguaauucuugcuga

SEQ ID NO: 3304 - RNA, 20 nt, Homo sapiens
uaccuagaagcacuguuuac

SEQ ID NO: 3305 - RNA, 20 nt, Homo sapiens
gccgucgugguaaauccagg

SEQ ID NO: 3306 - RNA, 20 nt, Homo sapiens
cuggauuuaccacgacggcg

SEQ ID NO: 3307 - RNA, 20 nt, Homo sapiens
cggcgguugagaaugaugug

SEQ ID NO: 3308 - RNA, 20 nt, Homo sapiens
auccugcucgacgacaucgc

SEQ ID NO: 3309 - RNA, 20 nt, Homo sapiens
cgugcagcggguaaacaaug

SEQ ID NO: 3310 - RNA, 20 nt, Homo sapiens
aggagcugaacaucauccaa

SEQ ID NO: 3311 - RNA, 20 nt, Homo sapiens
gaagaugacgauaccgaugg

SEQ ID NO: 3312 - RNA, 20 nt, Homo sapiens
cgugucguucauggaagggg

SEQ ID NO: 3313 - RNA, 20 nt, Homo sapiens
accaccuggauuuaccacga

SEQ ID NO: 3314 - RNA, 20 nt, Homo sapiens
gaggacaccaagaugaucgu

SEQ ID NO: 3315 - RNA, 20 nt, Homo sapiens
uguucagcuccuccuuaacg

SEQ ID NO: 3316 - RNA, 20 nt, Homo sapiens
gccgugguagucuccaccau

SEQ ID NO: 3317 - RNA, 20 nt, Homo sapiens
aggggagcgcuccaauaucg

SEQ ID NO: 3318 - RNA, 20 nt, Homo sapiens
gcgggugagcgaacggaccc

SEQ ID NO: 3319 - RNA, 20 nt, Homo sapiens
cauucucaaccgccgcaccu

SEQ ID NO: 3320 - RNA, 20 nt, Homo sapiens
gauaggcaccgucuauaacc

SEQ ID NO: 3321 - RNA, 20 nt, Homo sapiens
gaucaucgggcugcgacugg

SEQ ID NO: 3322 - RNA, 20 nt, Homo sapiens
ucauugaaaacaaagugcaa

SEQ ID NO: 3323 - RNA, 20 nt, Homo sapiens
acgugucguucauggaaggg

SEQ ID NO: 3324 - RNA, 20 nt, Homo sapiens
aggacgugaugaccccacuc

SEQ ID NO: 3325 - RNA, 20 nt, Homo sapiens
aucaugaagcagucccggag

SEQ ID NO: 3326 - RNA, 20 nt, Homo sapiens
ggagcugaacaucauccaag

SEQ ID NO: 3327 - RNA, 20 nt, Homo sapiens
ugcugaccggguaggaagcg

SEQ ID NO: 3328 - RNA, 20 nt, Homo sapiens
gcacgaugcgcagcuccauc

SEQ ID NO: 3329 - RNA, 20 nt, Homo sapiens
ggauccugcaggcggcugcg

SEQ ID NO: 3330 - RNA, 20 nt, Homo sapiens
ggaugcucuacagcgacaca

SEQ ID NO: 3331 - RNA, 20 nt, Homo sapiens
aucuauaugguaauacaaca

SEQ ID NO: 3332 - RNA, 20 nt, Homo sapiens
ucagaagccaaauugagcgu

SEQ ID NO: 3333 - RNA, 20 nt, Homo sapiens
gugaugagacaggauacagu

SEQ ID NO: 3334 - RNA, 20 nt, Homo sapiens
guacuacuguaacugcgacg

SEQ ID NO: 3335 - RNA, 20 nt, Homo sapiens
auuuauacgaaguggcacaa

SEQ ID NO: 3336 - RNA, 20 nt, Homo sapiens
ggaauccagaaaugugccug

SEQ ID NO: 3337 - RNA, 20 nt, Homo sapiens
uauuacuggauagauccuga

SEQ ID NO: 3338 - RNA, 20 nt, Homo sapiens
ugaccacagagugccagugg

SEQ ID NO: 3339 - RNA, 20 nt, Homo sapiens
gagaagcacuacuacugggg

SEQ ID NO: 3340 - RNA, 20 nt, Homo sapiens
acacaccuaaguuuaaacug

SEQ ID NO: 3341 - RNA, 20 nt, Homo sapiens
guuggagauacugaccguca

SEQ ID NO: 3342 - RNA, 20 nt, Homo sapiens
uggaaagugcucgcaaacau

SEQ ID NO: 3343 - RNA, 20 nt, Homo sapiens
gauuguugaacaccccaggu

SEQ ID NO: 3344 - RNA, 20 nt, Homo sapiens
cagaugcagacgccuguggu

SEQ ID NO: 3345 - RNA, 20 nt, Homo sapiens
uggaagcccuuacacuuggu

SEQ ID NO: 3346 - RNA, 20 nt, Homo sapiens
gcgacgcggacuacaagcaa

SEQ ID NO: 3347 - RNA, 20 nt, Homo sapiens
agugaaggaguaauccugca

SEQ ID NO: 3348 - RNA, 20 nt, Homo sapiens
uaugccaagauaaacaagag

SEQ ID NO: 3349 - RNA, 20 nt, Homo sapiens
auguugcaguaaacuuucag

SEQ ID NO: 3350 - RNA, 20 nt, Homo sapiens
aaacauuaacucugacggug

SEQ ID NO: 3351 - RNA, 20 nt, Homo sapiens
ucaagauuguugaacacccc

SEQ ID NO: 3352 - RNA, 20 nt, Homo sapiens
caacgcuacaaguuaccugg

SEQ ID NO: 3353 - RNA, 20 nt, Homo sapiens
cgagguucgcuuccuagcca

SEQ ID NO: 3354 - RNA, 20 nt, Homo sapiens
auuucccacaucaaaugaaa

SEQ ID NO: 3355 - RNA, 20 nt, Homo sapiens
aauggaucugacaccgacca

SEQ ID NO: 3356 - RNA, 20 nt, Homo sapiens
gugguacucgccgaucagug

SEQ ID NO: 3357 - RNA, 20 nt, Homo sapiens
ccugcggaggaaccuuacgc

SEQ ID NO: 3358 - RNA, 20 nt, Homo sapiens
ggacaucugacagcguccag

SEQ ID NO: 3359 - RNA, 20 nt, Homo sapiens
uucagaguacgagaacaacg

SEQ ID NO: 3360 - RNA, 20 nt, Homo sapiens
gcauccuuaccaaugcacag

SEQ ID NO: 3361 - RNA, 20 nt, Homo sapiens
cugaaccggauaauuagggg

SEQ ID NO: 3362 - RNA, 20 nt, Homo sapiens
uggccuauuagaauguaccc

SEQ ID NO: 3363 - RNA, 20 nt, Homo sapiens
acuguacagaacuacagugu

SEQ ID NO: 3364 - RNA, 20 nt, Homo sapiens
ccgguuauucagcugcacac

SEQ ID NO: 3365 - RNA, 20 nt, Homo sapiens
uggaggaucucauuacccau

SEQ ID NO: 3366 - RNA, 20 nt, Homo sapiens
ugaugaguauccgauccuga

SEQ ID NO: 3367 - RNA, 20 nt, Homo sapiens
gaaguuacguuguacccaca

SEQ ID NO: 3368 - RNA, 20 nt, Homo sapiens
gguugcucaugcucacaaug

SEQ ID NO: 3369 - RNA, 20 nt, Homo sapiens
cauacugcaagacgggaacg

SEQ ID NO: 3370 - RNA, 20 nt, Homo sapiens
ccacacucaccuaugcacga

SEQ ID NO: 3371 - RNA, 20 nt, Homo sapiens
aguuacguuguacccacaag

SEQ ID NO: 3372 - RNA, 20 nt, Homo sapiens
gaggugcacuccacacacgg

SEQ ID NO: 3373 - RNA, 20 nt, Homo sapiens
acauguggauccaaucugcg

SEQ ID NO: 3374 - RNA, 20 nt, Homo sapiens
cggauaguuccaacggcgaa

SEQ ID NO: 3375 - RNA, 20 nt, Homo sapiens
guccacuuaacagcaaccug

SEQ ID NO: 3376 - RNA, 20 nt, Homo sapiens
uacaacguaacuucucagaa

SEQ ID NO: 3377 - RNA, 20 nt, Homo sapiens
accgcgagaaagucaaacug

SEQ ID NO: 3378 - RNA, 20 nt, Homo sapiens
gguaccaaaggaauucggua

SEQ ID NO: 3379 - RNA, 20 nt, Homo sapiens
aggccugccuugaucguaug

SEQ ID NO: 3380 - RNA, 20 nt, Homo sapiens
cgggcacaacuucuacaacg

SEQ ID NO: 3381 - RNA, 20 nt, Homo sapiens
ucaacaaacggaauaccacg

SEQ ID NO: 3382 - RNA, 20 nt, Homo sapiens
caccaaugcgcacgucagcg

SEQ ID NO: 3383 - RNA, 20 nt, Homo sapiens
cccacagccuaccugccacg

SEQ ID NO: 3384 - RNA, 20 nt, Homo sapiens
ggccucuaugaaucccaugu

SEQ ID NO: 3385 - RNA, 20 nt, Homo sapiens
uaccuacaugggauucauag

SEQ ID NO: 3386 - RNA, 20 nt, Homo sapiens
guccucgguaaacauaacuc

SEQ ID NO: 3387 - RNA, 20 nt, Homo sapiens
augcuguggcagcaugugug

SEQ ID NO: 3388 - RNA, 20 nt, Homo sapiens
cggaauaccacguggcaggu

SEQ ID NO: 3389 - RNA, 20 nt, Homo sapiens
ggggacacacuuaccuacau

SEQ ID NO: 3390 - RNA, 20 nt, Homo sapiens
caaacggaauaccacguggc

SEQ ID NO: 3391 - RNA, 20 nt, Homo sapiens
ccguugacguggugcucaca

SEQ ID NO: 3392 - RNA, 20 nt, Homo sapiens
auccagaguuauguuuaccg

SEQ ID NO: 3393 - RNA, 20 nt, Homo sapiens
caaugcgcacgucagcgugg

SEQ ID NO: 3394 - RNA, 20 nt, Homo sapiens
guugaccagcucauccgaca

SEQ ID NO: 3395 - RNA, 20 nt, Homo sapiens
cucccggcccccaugcacgg

SEQ ID NO: 3396 - RNA, 20 nt, Homo sapiens
aggggacacacuuaccuaca

SEQ ID NO: 3397 - RNA, 20 nt, Homo sapiens
ugccugcaagcuucgaugca

SEQ ID NO: 3398 - RNA, 20 nt, Homo sapiens
acagaucuugcuacacuugg

SEQ ID NO: 3399 - RNA, 20 nt, Homo sapiens
cacagaucuugcuacacuug

SEQ ID NO: 3400 - RNA, 20 nt, Homo sapiens
cccugugagcaccacgucaa

SEQ ID NO: 3401 - RNA, 20 nt, Homo sapiens
agcaccacgucaacggcucc

SEQ ID NO: 3402 - RNA, 20 nt, Homo sapiens
cuacagcccgaccuacaaac

SEQ ID NO: 3403 - RNA, 20 nt, Homo sapiens
aucaaagagaucagagacca

SEQ ID NO: 3404 - RNA, 20 nt, Homo sapiens
guggcuauccugcugaagcu

SEQ ID NO: 3405 - RNA, 20 nt, Homo sapiens
ugcccagguaguauggcggu

SEQ ID NO: 3406 - RNA, 20 nt, Homo sapiens
uacccaccgccauacuaccu

SEQ ID NO: 3407 - RNA, 20 nt, Homo sapiens
caagugaaccucacuaucca

SEQ ID NO: 3408 - RNA, 20 nt, Homo sapiens
uuccaugcuagcaaugcacg

SEQ ID NO: 3409 - RNA, 20 nt, Homo sapiens
accucacuauccaaggacug

SEQ ID NO: 3410 - RNA, 20 nt, Homo sapiens
gugugugaguaugcaucucc

SEQ ID NO: 3411 - RNA, 20 nt, Homo sapiens
caacucauuccccaucaugu

SEQ ID NO: 3412 - RNA, 20 nt, Homo sapiens
ccuaugcccagguaguaugg

SEQ ID NO: 3413 - RNA, 20 nt, Homo sapiens
gggacucuacaucugcaagg

SEQ ID NO: 3414 - RNA, 20 nt, Homo sapiens
ccucacuauccaaggacuga

SEQ ID NO: 3415 - RNA, 20 nt, Homo sapiens
ugcauacucacacacaaagc

SEQ ID NO: 3416 - RNA, 20 nt, Homo sapiens
cuagaugauuccaucugcac

SEQ ID NO: 3417 - RNA, 20 nt, Homo sapiens
guucacuugauuuccacugg

SEQ ID NO: 3418 - RNA, 20 nt, Homo sapiens
aggacugagggccauggaca

SEQ ID NO: 3419 - RNA, 20 nt, Homo sapiens
guacccaccgccauacuacc

SEQ ID NO: 3420 - RNA, 20 nt, Homo sapiens
ccgccauacuaccugggcau

SEQ ID NO: 3421 - RNA, 20 nt, Homo sapiens
gugcggcaaccuacaugaug

SEQ ID NO: 3422 - RNA, 20 nt, Homo sapiens
uacuaccugggcauaggcaa

SEQ ID NO: 3423 - RNA, 20 nt, Homo sapiens
agguccgggugacagugcuu

SEQ ID NO: 3424 - RNA, 20 nt, Homo sapiens
ccugccgaagcacugucacc

SEQ ID NO: 3425 - RNA, 20 nt, Homo sapiens
gcagauggaaucaucuagga

SEQ ID NO: 3426 - RNA, 20 nt, Homo sapiens
ccaggugacugaagucugug

SEQ ID NO: 3427 - RNA, 20 nt, Homo sapiens
gcacaaggcucagcugaacc

SEQ ID NO: 3428 - RNA, 20 nt, Homo sapiens
gugguacuggccagcagccg

SEQ ID NO: 3429 - RNA, 20 nt, Homo sapiens
ggaugaagagaagaaaaaac

SEQ ID NO: 3430 - RNA, 20 nt, Homo sapiens
gagcuguauaacaaagcugg

SEQ ID NO: 3431 - RNA, 20 nt, Homo sapiens
uugagaaugcaggcucaugg

SEQ ID NO: 3432 - RNA, 20 nt, Homo sapiens
cagacuuacacaaaagcccc

SEQ ID NO: 3433 - RNA, 20 nt, Homo sapiens
cucaaggcucugccacaacu

SEQ ID NO: 3434 - RNA, 20 nt, Homo sapiens
agacuuacacaaaagcccca

SEQ ID NO: 3435 - RNA, 20 nt, Homo sapiens
aauggugucuugaccaguau

SEQ ID NO: 3436 - RNA, 20 nt, Homo sapiens
cgugagcuguauaacaaagc

SEQ ID NO: 3437 - RNA, 20 nt, Homo sapiens
acuggucgccacguugaaga

SEQ ID NO: 3438 - RNA, 20 nt, Homo sapiens
auuuccauuguucuguacaa

SEQ ID NO: 3439 - RNA, 20 nt, Homo sapiens
gauaaacaaacaagaagacc

SEQ ID NO: 3440 - RNA, 20 nt, Homo sapiens
cucuucaacguggcgaccag

SEQ ID NO: 3441 - RNA, 20 nt, Homo sapiens
ugcaggaagucugcagcaug

SEQ ID NO: 3442 - RNA, 20 nt, Homo sapiens
gacaggguaccugugcgccg

SEQ ID NO: 3443 - RNA, 20 nt, Homo sapiens
gcagcccuuguacagaacaa

SEQ ID NO: 3444 - RNA, 20 nt, Homo sapiens
acagaacaauggaaauggca

SEQ ID NO: 3445 - RNA, 20 nt, Homo sapiens
uaaagacagcaaaaguuggg

SEQ ID NO: 3446 - RNA, 20 nt, Homo sapiens
accaugagccugcauucuca

SEQ ID NO: 3447 - RNA, 20 nt, Homo sapiens
cuauaaagacagcaaaaguu

SEQ ID NO: 3448 - RNA, 20 nt, Homo sapiens
caccaagcacaaagucagca

SEQ ID NO: 3449 - RNA, 20 nt, Homo sapiens
acagggcucccucuucaacg

SEQ ID NO: 3450 - RNA, 20 nt, Homo sapiens
cuuguacagaacaauggaaa

SEQ ID NO: 3451 - RNA, 20 nt, Homo sapiens
gggcucuggaugccgaguug

SEQ ID NO: 3452 - RNA, 20 nt, Homo sapiens
uacuaccagcucuccaauac

SEQ ID NO: 3453 - RNA, 20 nt, Homo sapiens
ucuauaaagacagcaaaagu

SEQ ID NO: 3454 - RNA, 20 nt, Homo sapiens
cuugaagagauugcaacucu

SEQ ID NO: 3455 - RNA, 20 nt, Homo sapiens
acucacaugaucucaacacg

SEQ ID NO: 3456 - RNA, 20 nt, Homo sapiens
guaaucaaccuguuaaucca

SEQ ID NO: 3457 - RNA, 20 nt, Homo sapiens
agcaguuagcaaggaaaggu

SEQ ID NO: 3458 - RNA, 20 nt, Homo sapiens
cagcguacaguucuagagag

SEQ ID NO: 3459 - RNA, 20 nt, Homo sapiens
uuuacugaaagcaguuagca

SEQ ID NO: 3460 - RNA, 20 nt, Homo sapiens
uugauuacuaaugcugaugc

SEQ ID NO: 3461 - RNA, 20 nt, Homo sapiens
cguggacaaaauuggcuugc

SEQ ID NO: 3462 - RNA, 20 nt, Homo sapiens
agugcuacaaugaaaaagaa

SEQ ID NO: 3463 - RNA, 20 nt, Homo sapiens
gauaaggcagcaaaucagaa

SEQ ID NO: 3464 - RNA, 20 nt, Homo sapiens
augucugaauccagaaucga

SEQ ID NO: 3465 - RNA, 20 nt, Homo sapiens
uucuugauggccuucgauuc

SEQ ID NO: 3466 - RNA, 20 nt, Homo sapiens
cagugcuacaaugaaaaaga

SEQ ID NO: 3467 - RNA, 20 nt, Homo sapiens
cagaauggcaguuugauuca

SEQ ID NO: 3468 - RNA, 20 nt, Homo sapiens
cugacucuaaguggcauuca

SEQ ID NO: 3469 - RNA, 20 nt, Homo sapiens
ugcuuucaguaaauucuuga

SEQ ID NO: 3470 - RNA, 20 nt, Homo sapiens
ucuaaagaccuuggauuaac

SEQ ID NO: 3471 - RNA, 20 nt, Homo sapiens
cuuaucuuucugacucuaag

SEQ ID NO: 3472 - RNA, 20 nt, Homo sapiens
ucuaaguggcauucaaggua

SEQ ID NO: 3473 - RNA, 20 nt, Homo sapiens
ugaaagcaguuagcaaggaa

SEQ ID NO: 3474 - RNA, 20 nt, Homo sapiens
cacuuagagucagaaagaua

SEQ ID NO: 3475 - RNA, 20 nt, Homo sapiens
aucgcguccaacaaccguaa

SEQ ID NO: 3476 - RNA, 20 nt, Homo sapiens
ccauacgaaccgaauagaug

SEQ ID NO: 3477 - RNA, 20 nt, Homo sapiens
gugugcgccagagucagcga

SEQ ID NO: 3478 - RNA, 20 nt, Homo sapiens
cugaucgccauccuugaaca

SEQ ID NO: 3479 - RNA, 20 nt, Homo sapiens
uauggacuguccguuguggg

SEQ ID NO: 3480 - RNA, 20 nt, Homo sapiens
gauaugcuggccacccacaa

SEQ ID NO: 3481 - RNA, 20 nt, Homo sapiens
caucgcguccaacaaccgua

SEQ ID NO: 3482 - RNA, 20 nt, Homo sapiens
caauaccuccuacaagaaug

SEQ ID NO: 3483 - RNA, 20 nt, Homo sapiens
ucuguaugacauucaacuca

SEQ ID NO: 3484 - RNA, 20 nt, Homo sapiens
cccaucuauucgguucguau

SEQ ID NO: 3485 - RNA, 20 nt, Homo sapiens
gcagaucaaggagaugacau

SEQ ID NO: 3486 - RNA, 20 nt, Homo sapiens
cagcaucucaccuucaacca

SEQ ID NO: 3487 - RNA, 20 nt, Homo sapiens
ggagguauugaagcagauca

SEQ ID NO: 3488 - RNA, 20 nt, Homo sapiens
gguaucgccuucgcugacuc

SEQ ID NO: 3489 - RNA, 20 nt, Homo sapiens
agcaucucaccuucaaccag

SEQ ID NO: 3490 - RNA, 20 nt, Homo sapiens
uaccgccacgaagacaggaa

SEQ ID NO: 3491 - RNA, 20 nt, Homo sapiens
gccauccuugaacagggcaa

SEQ ID NO: 3492 - RNA, 20 nt, Homo sapiens
aggguccccauucuuguagg

SEQ ID NO: 3493 - RNA, 20 nt, Homo sapiens
agggcaaggacuucucuggg

SEQ ID NO: 3494 - RNA, 20 nt, Homo sapiens
gucauacagaauuacaauga

SEQ ID NO: 3495 - RNA, 20 nt, Homo sapiens
accaggggacuagguccacc

SEQ ID NO: 3496 - RNA, 20 nt, Homo sapiens
ugucuauggacuguccguug

SEQ ID NO: 3497 - RNA, 20 nt, Homo sapiens
caggguccauuuaaccacag

SEQ ID NO: 3498 - RNA, 20 nt, Homo sapiens
aauggcaggcugcccaccag

SEQ ID NO: 3499 - RNA, 20 nt, Homo sapiens
uguuggugauagagucacuc

SEQ ID NO: 3500 - RNA, 20 nt, Homo sapiens
uguuguucgaacaucaaugg

SEQ ID NO: 3501 - RNA, 20 nt, Homo sapiens
gcacuaacaacagaucaugu

SEQ ID NO: 3502 - RNA, 20 nt, Homo sapiens
uuuacgaaaaaucugccaag

SEQ ID NO: 3503 - RNA, 20 nt, Homo sapiens
cauucuuauccacaacauca

SEQ ID NO: 3504 - RNA, 20 nt, Homo sapiens
gcugaaggagagcgacgacg

SEQ ID NO: 3505 - RNA, 20 nt, Homo sapiens
gaaguugaaauacgcauacu

SEQ ID NO: 3506 - RNA, 20 nt, Homo sapiens
ucaacguuguacuuuccuca

SEQ ID NO: 3507 - RNA, 20 nt, Homo sapiens
gcacagaucuaagaacacga

SEQ ID NO: 3508 - RNA, 20 nt, Homo sapiens
ucaaccacaaaagaugacgu

SEQ ID NO: 3509 - RNA, 20 nt, Homo sapiens
cguguacguugcacccacaa

SEQ ID NO: 3510 - RNA, 20 nt, Homo sapiens
cuguuguuagugcagcacau

SEQ ID NO: 3511 - RNA, 20 nt, Homo sapiens
uccugaacaucucaccgagu

SEQ ID NO: 3512 - RNA, 20 nt, Homo sapiens
ucaggcccuuguuaaucaag

SEQ ID NO: 3513 - RNA, 20 nt, Homo sapiens
cugucauaaucaucacucag

SEQ ID NO: 3514 - RNA, 20 nt, Homo sapiens
uuccugauaguugcagacga

SEQ ID NO: 3515 - RNA, 20 nt, Homo sapiens
agaugcuuaucaaaagagug

SEQ ID NO: 3516 - RNA, 20 nt, Homo sapiens
uaaacugcauugucucacug

SEQ ID NO: 3517 - RNA, 20 nt, Homo sapiens
cuuacacaagucuggccaga

SEQ ID NO: 3518 - RNA, 20 nt, Homo sapiens
ccugucauaaucaucacuca

SEQ ID NO: 3519 - RNA, 20 nt, Homo sapiens
ucuuuccaacugguuaagca

SEQ ID NO: 3520 - RNA, 20 nt, Homo sapiens
gaaacuucagguugaaaugg

SEQ ID NO: 3521 - RNA, 20 nt, Homo sapiens
uauugcaguuggaaccgagc

SEQ ID NO: 3522 - RNA, 20 nt, Homo sapiens
cuggaauaccguaucaaagu

SEQ ID NO: 3523 - RNA, 20 nt, Homo sapiens
uucaacuagaaguggaaaca

SEQ ID NO: 3524 - RNA, 20 nt, Homo sapiens
gccuacucggugagauguuc

SEQ ID NO: 3525 - RNA, 20 nt, Homo sapiens
acauugguccaagcaucgag

SEQ ID NO: 3526 - RNA, 20 nt, Homo sapiens
gugcucacugauuucgagga

SEQ ID NO: 3527 - RNA, 20 nt, Homo sapiens
ucgcaaacgacgagagacag

SEQ ID NO: 3528 - RNA, 20 nt, Homo sapiens
gaugacugcgauugucccag

SEQ ID NO: 3529 - RNA, 20 nt, Homo sapiens
agugcucacugauuucgagg

SEQ ID NO: 3530 - RNA, 20 nt, Homo sapiens
gaagcagaccgacaucacag

SEQ ID NO: 3531 - RNA, 20 nt, Homo sapiens
acaacauuuacacaguacac

SEQ ID NO: 3532 - RNA, 20 nt, Homo sapiens
uuuaccuucagacugaugcg

SEQ ID NO: 3533 - RNA, 20 nt, Homo sapiens
ccuuggcaggaaauccacuu

SEQ ID NO: 3534 - RNA, 20 nt, Homo sapiens
acaagugaccacucgaugcu

SEQ ID NO: 3535 - RNA, 20 nt, Homo sapiens
cacaauuaggacccugcagu

SEQ ID NO: 3536 - RNA, 20 nt, Homo sapiens
gcaaagcauugguaucucac

SEQ ID NO: 3537 - RNA, 20 nt, Homo sapiens
gagaguuagaggaaaaagau

SEQ ID NO: 3538 - RNA, 20 nt, Homo sapiens
gaguaggacacuacuucccu

SEQ ID NO: 3539 - RNA, 20 nt, Homo sapiens
gaugucggaaucuucagcca

SEQ ID NO: 3540 - RNA, 20 nt, Homo sapiens
aacaacauuuacacaguaca

SEQ ID NO: 3541 - RNA, 20 nt, Homo sapiens
gcacaauuaggacccugcag

SEQ ID NO: 3542 - RNA, 20 nt, Homo sapiens
cgcugacuccuaccugacag

SEQ ID NO: 3543 - RNA, 20 nt, Homo sapiens
gaguggucacuuguauggac

SEQ ID NO: 3544 - RNA, 20 nt, Homo sapiens
cuugccacgcaucagucuga

SEQ ID NO: 3545 - RNA, 20 nt, Homo sapiens
aucucaccggagccgccucu

SEQ ID NO: 3546 - RNA, 20 nt, Homo sapiens
ugcagucagacucagaacuu

SEQ ID NO: 3547 - RNA, 20 nt, Homo sapiens
guggaagacguauucuggug

SEQ ID NO: 3548 - RNA, 20 nt, Homo sapiens
caucaguggagacagugaug

SEQ ID NO: 3549 - RNA, 20 nt, Homo sapiens
aaaaaacaggaagugaagga

SEQ ID NO: 3550 - RNA, 20 nt, Homo sapiens
cgugcacgguggaacugcca

SEQ ID NO: 3551 - RNA, 20 nt, Homo sapiens
ccugccauaucagucagccg

SEQ ID NO: 3552 - RNA, 20 nt, Homo sapiens
cagagugagccguuuguccg

SEQ ID NO: 3553 - RNA, 20 nt, Homo sapiens
acugucgucagcugauucgg

SEQ ID NO: 3554 - DNA, 20 bp, Homo sapiens
agagcggaaaagccccccgg

SEQ ID NO: 3555 - RNA, 20 nt, Homo sapiens
acugcauagucgauucaugc

SEQ ID NO: 3556 - RNA, 20 nt, Homo sapiens
aguaagcaagccgugcacgg

SEQ ID NO: 3557 - RNA, 20 nt, Homo sapiens
aacaaguauaccaagagccg

SEQ ID NO: 3558 - RNA, 20 nt, Homo sapiens
ccacggcugacugauauggc

SEQ ID NO: 3559 - RNA, 20 nt, Homo sapiens
cguggcaguuccaccgugca

SEQ ID NO: 3560 - RNA, 20 nt, Homo sapiens
uucaguaagcaagccgugca

SEQ ID NO: 3561 - RNA, 20 nt, Homo sapiens
cugccuucuucuuggcugcg

SEQ ID NO: 3562 - RNA, 20 nt, Homo sapiens
agcuucccguauaccaccaa

SEQ ID NO: 3563 - RNA, 20 nt, Homo sapiens
ggaucaucaacccugauggg

SEQ ID NO: 3564 - RNA, 20 nt, Homo sapiens
gcagugaugagcuggaugcg

SEQ ID NO: 3565 - RNA, 20 nt, Homo sapiens
ugaugagcuggaugcgugga

SEQ ID NO: 3566 - RNA, 20 nt, Homo sapiens
gcacccgggccgaguccuca

SEQ ID NO: 3567 - RNA, 20 nt, Homo sapiens
gcuuacugaaggugacaggc

SEQ ID NO: 3568 - RNA, 20 nt, Homo sapiens
cccuccgggugccagcaccc

SEQ ID NO: 3569 - RNA, 20 nt, Homo sapiens
cguuagaauuggugcgugaa

SEQ ID NO: 3570 - RNA, 20 nt, Homo sapiens
uugccaugaugggcgacagg

SEQ ID NO: 3571 - RNA, 20 nt, Homo sapiens
gugcacggcuugcuuacuga

SEQ ID NO: 3572 - RNA, 20 nt, Homo sapiens
guggguacgcaccuuccagc

SEQ ID NO: 3573 - RNA, 20 nt, Homo sapiens
cgccgacuccaugauccccg

SEQ ID NO: 3574 - RNA, 20 nt, Homo sapiens
ggcgguggcagcgguugcug

SEQ ID NO: 3575 - RNA, 20 nt, Homo sapiens
ccuuggcaccguacgccugg

SEQ ID NO: 3576 - RNA, 20 nt, Homo sapiens
uguacugcccauacugucgg

SEQ ID NO: 3577 - RNA, 20 nt, Homo sapiens
ggcauaagaaauuugacggu

SEQ ID NO: 3578 - RNA, 20 nt, Homo sapiens
gugcagcauguauauuccug

SEQ ID NO: 3579 - RNA, 20 nt, Homo sapiens
augagggcacggauacaccc

SEQ ID NO: 3580 - RNA, 20 nt, Homo sapiens
caugcaagaaaacagcaugc

SEQ ID NO: 3581 - RNA, 20 nt, Homo sapiens
cuacugucucaacgucauga

SEQ ID NO: 3582 - RNA, 20 nt, Homo sapiens
ugagggcacggauacacccu

SEQ ID NO: 3583 - RNA, 20 nt, Homo sapiens
uugagacaguaguuguugca

SEQ ID NO: 3584 - RNA, 20 nt, Homo sapiens
ugggaagcccccgacaguau

SEQ ID NO: 3585 - RNA, 20 nt, Homo sapiens
gagggcacggauacacccug

SEQ ID NO: 3586 - RNA, 20 nt, Homo sapiens
aggcugaccucgacacagag

SEQ ID NO: 3587 - RNA, 20 nt, Homo sapiens
cuguacugcccauacugucg

SEQ ID NO: 3588 - RNA, 20 nt, Homo sapiens
auccccuaccaggagaucgc

SEQ ID NO: 3589 - RNA, 20 nt, Homo sapiens
ggggccauucaacauugagu

SEQ ID NO: 3590 - RNA, 20 nt, Homo sapiens
acagauuccacucugugucg

SEQ ID NO: 3591 - RNA, 20 nt, Homo sapiens
ugcuguacugcccauacugu

SEQ ID NO: 3592 - RNA, 20 nt, Homo sapiens
augaccgacucaauguugaa

SEQ ID NO: 3593 - RNA, 20 nt, Homo sapiens
gcaguacagcaucuucauga

SEQ ID NO: 3594 - RNA, 20 nt, Homo sapiens
uacugucucaacgucaugaa

SEQ ID NO: 3595 - RNA, 20 nt, Homo sapiens
acacuuaagaaucuguccuc

SEQ ID NO: 3596 - RNA, 20 nt, Homo sapiens
cggugccaagggauucagcc

SEQ ID NO: 3597 - RNA, 20 nt, Homo sapiens
cugaaaagguacuacacugg

SEQ ID NO: 3598 - RNA, 20 nt, Homo sapiens
accugaaucuucaguuuccg

SEQ ID NO: 3599 - RNA, 20 nt, Homo sapiens
uaacuugucuuccauuucug

SEQ ID NO: 3600 - RNA, 20 nt, Homo sapiens
uuuacgugugacacgcagaa

SEQ ID NO: 3601 - RNA, 20 nt, Homo sapiens
cgugucacacguaaaccccg

SEQ ID NO: 3602 - RNA, 20 nt, Homo sapiens
cagcugcugacauuaucaca

SEQ ID NO: 3603 - RNA, 20 nt, Homo sapiens
aucgaccauaacacagcacg

SEQ ID NO: 3604 - RNA, 20 nt, Homo sapiens
cugcugccgucuacagucgg

SEQ ID NO: 3605 - RNA, 20 nt, Homo sapiens
guuuacgugugacacgcaga

SEQ ID NO: 3606 - RNA, 20 nt, Homo sapiens
ccacauacacugcugucccg

SEQ ID NO: 3607 - RNA, 20 nt, Homo sapiens
uccacagguaacaacuccgu

SEQ ID NO: 3608 - RNA, 20 nt, Homo sapiens
ggugugaaccaggucgcaga

SEQ ID NO: 3609 - RNA, 20 nt, Homo sapiens
ccgcgggacagcaguguaug

SEQ ID NO: 3610 - RNA, 20 nt, Homo sapiens
ggucacacacagugucuugg

SEQ ID NO: 3611 - RNA, 20 nt, Homo sapiens
guccggacacaugaccgagc

SEQ ID NO: 3612 - RNA, 20 nt, Homo sapiens
acuaagcugccugcgcacac

SEQ ID NO: 3613 - RNA, 20 nt, Homo sapiens
gaguuggcagcagguaucgg

SEQ ID NO: 3614 - RNA, 20 nt, Homo sapiens
acauacacugcugucccgcg

SEQ ID NO: 3615 - RNA, 20 nt, Homo sapiens
ggaugugaaaugugacaugg

SEQ ID NO: 3616 - RNA, 20 nt, Homo sapiens
cggucauguguccggacgca

SEQ ID NO: 3617 - RNA, 20 nt, Homo sapiens
ugauagucaguucgaaugcc

SEQ ID NO: 3618 - RNA, 20 nt, Homo sapiens
gugucacacguaaaccccgc

SEQ ID NO: 3619 - RNA, 20 nt, Homo sapiens
uggcagcagguaucggagga

SEQ ID NO: 3620 - RNA, 20 nt, Homo sapiens
guccacagguaacaacuccg

SEQ ID NO: 3621 - RNA, 20 nt, Homo sapiens
ccugcugccaacucacgucu

SEQ ID NO: 3622 - RNA, 20 nt, Homo sapiens
gggggaugugaaaugugaca

SEQ ID NO: 3623 - RNA, 20 nt, Homo sapiens
uccacaggccguggcaugcg

SEQ ID NO: 3624 - RNA, 20 nt, Homo sapiens
acaacacugagcaggcaucu

SEQ ID NO: 3625 - RNA, 20 nt, Homo sapiens
cgagacuacgacccucggca

SEQ ID NO: 3626 - RNA, 20 nt, Homo sapiens
auccggacccuggacaacgg

SEQ ID NO: 3627 - RNA, 20 nt, Homo sapiens
auguauugccuccgaccugg

SEQ ID NO: 3628 - RNA, 20 nt, Homo sapiens
uggggcuuggaagacaugca

SEQ ID NO: 3629 - RNA, 20 nt, Homo sapiens
cuacaacaagcacaccaagg

SEQ ID NO: 3630 - RNA, 20 nt, Homo sapiens
cugucuccagagagucaacg

SEQ ID NO: 3631 - RNA, 20 nt, Homo sapiens
ccagcuugagggauucccga

SEQ ID NO: 3632 - RNA, 20 nt, Homo sapiens
ccgagggucguagucucgca

SEQ ID NO: 3633 - RNA, 20 nt, Homo sapiens
cucgcuaucccggaucauga

SEQ ID NO: 3634 - RNA, 20 nt, Homo sapiens
aauggccucguaaucauaca

SEQ ID NO: 3635 - RNA, 20 nt, Homo sapiens
ccgugcgagacuacgacccu

SEQ ID NO: 3636 - RNA, 20 nt, Homo sapiens
ugucuccagagagucaacgc

SEQ ID NO: 3637 - RNA, 20 nt, Homo sapiens
ucacgguaucucccugccga

SEQ ID NO: 3638 - RNA, 20 nt, Homo sapiens
caagcuggucaaacuucaug

SEQ ID NO: 3639 - RNA, 20 nt, Homo sapiens
gguugcccuguaugauuacg

SEQ ID NO: 3640 - RNA, 20 nt, Homo sapiens
uccagcuugagggauucccg

SEQ ID NO: 3641 - RNA, 20 nt, Homo sapiens
gcuggucaaacuucaugcgg

SEQ ID NO: 3642 - RNA, 20 nt, Homo sapiens
gcacguacacaggacagugu

SEQ ID NO: 3643 - RNA, 20 nt, Homo sapiens
aagauccggacccuggacaa

SEQ ID NO: 3644 - RNA, 20 nt, Homo sapiens
gaagccagggagcaugucgg

SEQ ID NO: 3645 - RNA, 20 nt, Homo sapiens
uggggaagucuggaugggua

SEQ ID NO: 3646 - RNA, 20 nt, Homo sapiens
aggcucugaggacaucaucg

SEQ ID NO: 3647 - RNA, 20 nt, Homo sapiens
ggaccagauggugguccuag

SEQ ID NO: 3648 - RNA, 20 nt, Homo sapiens
ucccacauccaccaucaagc

SEQ ID NO: 3649 - RNA, 20 nt, Homo sapiens
gaaggagcccagcauguugc

SEQ ID NO: 3650 - RNA, 20 nt, Homo sapiens
ccacauaaaagacccgcccg

SEQ ID NO: 3651 - RNA, 20 nt, Homo sapiens
caaaauugcgagcaucccgu

SEQ ID NO: 3652 - RNA, 20 nt, Homo sapiens
cuucuccucgcaagacgacg

SEQ ID NO: 3653 - RNA, 20 nt, Homo sapiens
gcacauucuacucaccaaug

SEQ ID NO: 3654 - RNA, 20 nt, Homo sapiens
gaugugucuacccuggagca

SEQ ID NO: 3655 - RNA, 20 nt, Homo sapiens
gcggauguaguguguccgcg

SEQ ID NO: 3656 - RNA, 20 nt, Homo sapiens
acaugauucugaaaguccga

SEQ ID NO: 3657 - RNA, 20 nt, Homo sapiens
cggauggcaugcggagaucg

SEQ ID NO: 3658 - RNA, 20 nt, Homo sapiens
agcgaaccauugcaacagag

SEQ ID NO: 3659 - RNA, 20 nt, Homo sapiens
ucaugcugaaaauaccuggg

SEQ ID NO: 3660 - RNA, 20 nt, Homo sapiens
ggagaacagcgcguucgagu

SEQ ID NO: 3661 - RNA, 20 nt, Homo sapiens
gcaggacgugcuguagcacg

SEQ ID NO: 3662 - RNA, 20 nt, Homo sapiens
ggaaggucuggaaucccccg

SEQ ID NO: 3663 - RNA, 20 nt, Homo sapiens
aagugguagcucgacuguug

SEQ ID NO: 3664 - RNA, 20 nt, Homo sapiens
gaguauaggacauucaccua

SEQ ID NO: 3665 - RNA, 20 nt, Homo sapiens
aggugguugugcgguucacg

SEQ ID NO: 3666 - RNA, 20 nt, Homo sapiens
agcaaccacccccaguguca

SEQ ID NO: 3667 - RNA, 20 nt, Homo sapiens
cauccacugggacauaaagg

SEQ ID NO: 3668 - RNA, 20 nt, Homo sapiens
ucagucacagguuuacccua

SEQ ID NO: 3669 - RNA, 20 nt, Homo sapiens
gagaucaaaacggaccagca

SEQ ID NO: 3670 - RNA, 20 nt, Homo sapiens
augcggauguaguguguccg

SEQ ID NO: 3671 - RNA, 20 nt, Homo sapiens
ggaagcagcagucaucacgg

SEQ ID NO: 3672 - RNA, 20 nt, Homo sapiens
gaugagaccguccaaggaca

SEQ ID NO: 3673 - DNA, 20 bp, Homo sapiens
aggacagagaagagcccgag

SEQ ID NO: 3674 - RNA, 20 nt, Homo sapiens
gucccacagagaccaugccc

SEQ ID NO: 3675 - RNA, 20 nt, Homo sapiens
caggcaaucuauaccugcgg

SEQ ID NO: 3676 - RNA, 20 nt, Homo sapiens
cucuacuaugaagcacugug

SEQ ID NO: 3677 - RNA, 20 nt, Homo sapiens
agaggagugcaaauucaaca

SEQ ID NO: 3678 - RNA, 20 nt, Homo sapiens
ccuaccuuguaguuaacugg

SEQ ID NO: 3679 - RNA, 20 nt, Homo sapiens
gaagucuaacgcuugcagag

SEQ ID NO: 3680 - RNA, 20 nt, Homo sapiens
ugggccaccaguuaacuaca

SEQ ID NO: 3681 - RNA, 20 nt, Homo sapiens
agacaggcaaucuauaccug

SEQ ID NO: 3682 - RNA, 20 nt, Homo sapiens
gucaaguucauccaacacgc

SEQ ID NO: 3683 - RNA, 20 nt, Homo sapiens
ggagugcaaauucaacaagg

SEQ ID NO: 3684 - RNA, 20 nt, Homo sapiens
uagagggucacauugacaag

SEQ ID NO: 3685 - RNA, 20 nt, Homo sapiens
ggugcccuacggaaacgcac

SEQ ID NO: 3686 - RNA, 20 nt, Homo sapiens
ugaggggcgucacucacuag

SEQ ID NO: 3687 - RNA, 20 nt, Homo sapiens
ccaccaguuaacuacaaggu

SEQ ID NO: 3688 - RNA, 20 nt, Homo sapiens
agaagucuaacgcuugcaga

SEQ ID NO: 3689 - RNA, 20 nt, Homo sapiens
acaggcaaucuauaccugcg

SEQ ID NO: 3690 - RNA, 20 nt, Homo sapiens
aagaagucuaacgcuugcag

SEQ ID NO: 3691 - RNA, 20 nt, Homo sapiens
cgcacagugcuucauaguag

SEQ ID NO: 3692 - RNA, 20 nt, Homo sapiens
gcucccggaucaggaaggcu

SEQ ID NO: 3693 - RNA, 20 nt, Homo sapiens
gcacagugcuucauaguaga

SEQ ID NO: 3694 - RNA, 20 nt, Homo sapiens
ucauccaacacgcaggccug

SEQ ID NO: 3695 - RNA, 20 nt, Homo sapiens
caugcagacaauggucagga

SEQ ID NO: 3696 - RNA, 20 nt, Homo sapiens
gacaggcaaucuauaccugc

SEQ ID NO: 3697 - RNA, 20 nt, Homo sapiens
aggaacaaaaugucaguggc

SEQ ID NO: 3698 - RNA, 20 nt, Homo sapiens
uccgggagcucuucccaaca

SEQ ID NO: 3699 - RNA, 20 nt, Homo sapiens
gccaccgcugcugcugcugc

SEQ ID NO: 3700 - RNA, 20 nt, Homo sapiens
cacauuccaaauacugacgg

SEQ ID NO: 3701 - RNA, 20 nt, Homo sapiens
ggugauaucagaccccacua

SEQ ID NO: 3702 - RNA, 20 nt, Homo sapiens
ugacacuauggggcuagaug

SEQ ID NO: 3703 - RNA, 20 nt, Homo sapiens
uauaagucuaguguucaugg

SEQ ID NO: 3704 - RNA, 20 nt, Homo sapiens
ggugugucguuuaucgaaaa

SEQ ID NO: 3705 - RNA, 20 nt, Homo sapiens
uaucagaccccacuacggcu

SEQ ID NO: 3706 - RNA, 20 nt, Homo sapiens
uuguuauaguacaucccuga

SEQ ID NO: 3707 - RNA, 20 nt, Homo sapiens
auaucaccagcauaaccgag

SEQ ID NO: 3708 - RNA, 20 nt, Homo sapiens
ugugacuggccaagccguag

SEQ ID NO: 3709 - RNA, 20 nt, Homo sapiens
ucugaaaccaagucugcaua

SEQ ID NO: 3710 - RNA, 20 nt, Homo sapiens
uuguaugccagacagauauc

SEQ ID NO: 3711 - RNA, 20 nt, Homo sapiens
uuauguugugugacacuaug

SEQ ID NO: 3712 - RNA, 20 nt, Homo sapiens
cagagccaaaugauucccua

SEQ ID NO: 3713 - RNA, 20 nt, Homo sapiens
uuuauguugugugacacuau

SEQ ID NO: 3714 - RNA, 20 nt, Homo sapiens
auaaccuagacgacauaaag

SEQ ID NO: 3715 - RNA, 20 nt, Homo sapiens
agggaaauaacuuacccgcu

SEQ ID NO: 3716 - RNA, 20 nt, Homo sapiens
uaucaccagcauaaccgagc

SEQ ID NO: 3717 - RNA, 20 nt, Homo sapiens
acuuacccgcucgguuaugc

SEQ ID NO: 3718 - RNA, 20 nt, Homo sapiens
cuucacauuccaaauacuga

SEQ ID NO: 3719 - RNA, 20 nt, Homo sapiens
caagaauccaacuuacucuc

SEQ ID NO: 3720 - RNA, 20 nt, Homo sapiens
ugacuggccaagccguagug

SEQ ID NO: 3721 - RNA, 20 nt, Homo sapiens
augauuguagccuuuaugcu

SEQ ID NO: 3722 - RNA, 20 nt, Homo sapiens
gugacacuauggggcuagau

SEQ ID NO: 3723 - RNA, 20 nt, Homo sapiens
guugaaagaugcagccguca

SEQ ID NO: 3724 - RNA, 20 nt, Homo sapiens
auagugucacacaacauaaa

SEQ ID NO: 3725 - RNA, 20 nt, Homo sapiens
uggucugcgauccugaaugg

SEQ ID NO: 3726 - RNA, 20 nt, Homo sapiens
cuggucugcgauccugaaug

SEQ ID NO: 3727 - RNA, 20 nt, Homo sapiens
gcugcucuucacuugcagug

SEQ ID NO: 3728 - RNA, 20 nt, Homo sapiens
accuccuccgacggccauga

SEQ ID NO: 3729 - RNA, 20 nt, Homo sapiens
ugcucggagagcucggacag

SEQ ID NO: 3730 - RNA, 20 nt, Homo sapiens
cugaccuucauggccgucgg

SEQ ID NO: 3731 - RNA, 20 nt, Homo sapiens
ucugcgauccugaauggggg

SEQ ID NO: 3732 - RNA, 20 nt, Homo sapiens
ugcagguaagaaaaagugcu

SEQ ID NO: 3733 - RNA, 20 nt, Homo sapiens
gcccugaccuucauggccgu

SEQ ID NO: 3734 - RNA, 20 nt, Homo sapiens
cggcaucgcggccaacucgg

SEQ ID NO: 3735 - RNA, 20 nt, Homo sapiens
accuucauggccgucggagg

SEQ ID NO: 3736 - RNA, 20 nt, Homo sapiens
cgcagaccagcucaucagcg

SEQ ID NO: 3737 - RNA, 20 nt, Homo sapiens
cagcgaggcagccaccgagu

SEQ ID NO: 3738 - RNA, 20 nt, Homo sapiens
gaaaaagugcucggagagcu

SEQ ID NO: 3739 - RNA, 20 nt, Homo sapiens
ucauggccgucggaggaggu

SEQ ID NO: 3740 - RNA, 20 nt, Homo sapiens
cagcggcuccggguucugga

SEQ ID NO: 3741 - RNA, 20 nt, Homo sapiens
uccagacccaccuccuccga

SEQ ID NO: 3742 - RNA, 20 nt, Homo sapiens
gcucuucacuugcagugggg

SEQ ID NO: 3743 - RNA, 20 nt, Homo sapiens
ugcugcucuucacuugcagu

SEQ ID NO: 3744 - RNA, 20 nt, Homo sapiens
cgccggcaucgcggccaacu

SEQ ID NO: 3745 - RNA, 20 nt, Homo sapiens
agcuggucugcgauccugaa

SEQ ID NO: 3746 - RNA, 20 nt, Homo sapiens
gcuggucugcgauccugaau

SEQ ID NO: 3747 - RNA, 20 nt, Homo sapiens
cuccaggacucgcagucgcc

SEQ ID NO: 3748 - RNA, 20 nt, Homo sapiens
guggaggcaggugagaaugc

SEQ ID NO: 3749 - RNA, 20 nt, Homo sapiens
cugcccgcgcugggcuucac

SEQ ID NO: 3750 - RNA, 20 nt, Homo sapiens
ugaucacgguggaccuugga

SEQ ID NO: 3751 - RNA, 20 nt, Homo sapiens
auguugaucacgguggaccu

SEQ ID NO: 3752 - RNA, 20 nt, Homo sapiens
gcuguggauguugaucacgg

SEQ ID NO: 3753 - RNA, 20 nt, Homo sapiens
cccccagcaccauccuucca

SEQ ID NO: 3754 - RNA, 20 nt, Homo sapiens
gcacaaggaggaacaugagg

SEQ ID NO: 3755 - RNA, 20 nt, Homo sapiens
cucgcuguggauguugauca

SEQ ID NO: 3756 - RNA, 20 nt, Homo sapiens
agcauucgccuacuccguga

SEQ ID NO: 3757 - RNA, 20 nt, Homo sapiens
acagcaccaguucaagaaga

SEQ ID NO: 3758 - RNA, 20 nt, Homo sapiens
cauacgcaccuucacggagu

SEQ ID NO: 3759 - RNA, 20 nt, Homo sapiens
gacagcaccaguucaagaag

SEQ ID NO: 3760 - RNA, 20 nt, Homo sapiens
cacgguggaccuuggaagga

SEQ ID NO: 3761 - RNA, 20 nt, Homo sapiens
cuuggaaggauggugcuggg

SEQ ID NO: 3762 - RNA, 20 nt, Homo sapiens
aucuuccugucccuagacug

SEQ ID NO: 3763 - RNA, 20 nt, Homo sapiens
uucuugaacuggugcugucu

SEQ ID NO: 3764 - RNA, 20 nt, Homo sapiens
gaugguuggcgacgugaccg

SEQ ID NO: 3765 - RNA, 20 nt, Homo sapiens
ucaacacccucuucuugaac

SEQ ID NO: 3766 - RNA, 20 nt, Homo sapiens
ccuuggaaggauggugcugg

SEQ ID NO: 3767 - RNA, 20 nt, Homo sapiens
accuuggaaggauggugcug

SEQ ID NO: 3768 - RNA, 20 nt, Homo sapiens
cagggccauacgcaccuuca

SEQ ID NO: 3769 - RNA, 20 nt, Homo sapiens
cuucuugaacuggugcuguc

SEQ ID NO: 3770 - RNA, 20 nt, Homo sapiens
gaccuuggaaggauggugcu

SEQ ID NO: 3771 - RNA, 20 nt, Homo sapiens
cucucccccagucuagggac

SEQ ID NO: 3772 - RNA, 20 nt, Homo sapiens
agaugguuggcgacgugacc

SEQ ID NO: 3773 - RNA, 20 nt, Homo sapiens
ggaccuuggaaggauggugc

SEQ ID NO: 3774 - RNA, 20 nt, Homo sapiens
ucaagaagaggguguugaac

SEQ ID NO: 3775 - RNA, 20 nt, Homo sapiens
gaugcucaaggaggagcacg

SEQ ID NO: 3776 - RNA, 20 nt, Homo sapiens
gcacgagguggcugugcugg

SEQ ID NO: 3777 - RNA, 20 nt, Homo sapiens
ggcagcagggguucaugaag

SEQ ID NO: 3778 - RNA, 20 nt, Homo sapiens
auguggaucacgguggacgu

SEQ ID NO: 3779 - RNA, 20 nt, Homo sapiens
agcauucgccuacuccguga

SEQ ID NO: 3780 - RNA, 20 nt, Homo sapiens
cauacgcaccuucacggagu

SEQ ID NO: 3781 - RNA, 20 nt, Homo sapiens
guggaucacgguggacgucg

SEQ ID NO: 3782 - RNA, 20 nt, Homo sapiens
agcacgagguggcugugcug

SEQ ID NO: 3783 - RNA, 20 nt, Homo sapiens
cgguggacgucgggggagca

SEQ ID NO: 3784 - RNA, 20 nt, Homo sapiens
uggaucacgguggacgucgg

SEQ ID NO: 3785 - RNA, 20 nt, Homo sapiens
gggggcuggccacuguugac

SEQ ID NO: 3786 - RNA, 20 nt, Homo sapiens
aggcgaaugcuaugaagccc

SEQ ID NO: 3787 - RNA, 20 nt, Homo sapiens
uguggaucacgguggacguc

SEQ ID NO: 3788 - RNA, 20 nt, Homo sapiens
aucuuccugucccuagacug

SEQ ID NO: 3789 - RNA, 20 nt, Homo sapiens
gcaucucauaguuggggggc

SEQ ID NO: 3790 - RNA, 20 nt, Homo sapiens
gagcacgagguggcugugcu

SEQ ID NO: 3791 - RNA, 20 nt, Homo sapiens
ggagcacgagguggcugugc

SEQ ID NO: 3792 - RNA, 20 nt, Homo sapiens
cucgcugcggauguggauca

SEQ ID NO: 3793 - RNA, 20 nt, Homo sapiens
cucucccccagucuagggac

SEQ ID NO: 3794 - RNA, 20 nt, Homo sapiens
acgguggacgucgggggagc

SEQ ID NO: 3795 - RNA, 20 nt, Homo sapiens
uggggccauacgcaccuuca

SEQ ID NO: 3796 - RNA, 20 nt, Homo sapiens
aucuccucucccccagucua

SEQ ID NO: 3797 - RNA, 20 nt, Homo sapiens
caucuuccugucccuagacu

SEQ ID NO: 3798 - RNA, 20 nt, Homo sapiens
caucuccucucccccagucu

SEQ ID NO: 3799 - RNA, 20 nt, Homo sapiens
ccaucuuccugucccuagac

SEQ ID NO: 3800 - RNA, 20 nt, Homo sapiens
agcauucgcguacuccguga

SEQ ID NO: 3801 - RNA, 20 nt, Homo sapiens
ugaacagggaccagaccaca

SEQ ID NO: 3802 - RNA, 20 nt, Homo sapiens
gaccacauggucaggcacgg

SEQ ID NO: 3803 - RNA, 20 nt, Homo sapiens
gaccuccgugccugaccaug

SEQ ID NO: 3804 - RNA, 20 nt, Homo sapiens
ccagaccacauggucaggca

SEQ ID NO: 3805 - RNA, 20 nt, Homo sapiens
uugagcaucucguaguuggg

SEQ ID NO: 3806 - RNA, 20 nt, Homo sapiens
caacuacgagaugcucaagg

SEQ ID NO: 3807 - RNA, 20 nt, Homo sapiens
ucccaacuacgagaugcuca

SEQ ID NO: 3808 - RNA, 20 nt, Homo sapiens
uggaucacgguggacaucgg

SEQ ID NO: 3809 - RNA, 20 nt, Homo sapiens
guggaucacgguggacaucg

SEQ ID NO: 3810 - RNA, 20 nt, Homo sapiens
agggaccagaccacaugguc

SEQ ID NO: 3811 - RNA, 20 nt, Homo sapiens
auguggaucacgguggacau

SEQ ID NO: 3812 - RNA, 20 nt, Homo sapiens
ggcagcagguguucaugaag

SEQ ID NO: 3813 - RNA, 20 nt, Homo sapiens
gcagcagguguucaugaaga

SEQ ID NO: 3814 - RNA, 20 nt, Homo sapiens
gcaggaaguggcuaugcugg

SEQ ID NO: 3815 - RNA, 20 nt, Homo sapiens
agcaggaaguggcuaugcug

SEQ ID NO: 3816 - RNA, 20 nt, Homo sapiens
ccgugccugaccaugugguc

SEQ ID NO: 3817 - RNA, 20 nt, Homo sapiens
cgguggacaucgggggagca

SEQ ID NO: 3818 - RNA, 20 nt, Homo sapiens
gccgcuguugacaggagaga

SEQ ID NO: 3819 - RNA, 20 nt, Homo sapiens
acgcgaaugcuaugaagccc

SEQ ID NO: 3820 - RNA, 20 nt, Homo sapiens
uccuugagcaucucguaguu

SEQ ID NO: 3821 - RNA, 20 nt, Homo sapiens
gcaucucguaguugggaggc

SEQ ID NO: 3822 - RNA, 20 nt, Homo sapiens
aucuuccugucccuagacug

SEQ ID NO: 3823 - RNA, 20 nt, Homo sapiens
gagcaggaaguggcuaugcu

SEQ ID NO: 3824 - RNA, 20 nt, Homo sapiens
uucaugaacaccugcugccu

SEQ ID NO: 3825 - RNA, 20 nt, Homo sapiens
cuuauaauaaauaugguccg

SEQ ID NO: 3826 - RNA, 20 nt, Homo sapiens
uuauuucagauaaugcaccc

SEQ ID NO: 3827 - RNA, 20 nt, Homo sapiens
uuacagccauaccucuaggc

SEQ ID NO: 3828 - RNA, 20 nt, Homo sapiens
auaguuacagccauaccucu

SEQ ID NO: 3829 - RNA, 20 nt, Homo sapiens
ucagucauaucuucaaauag

SEQ ID NO: 3830 - RNA, 20 nt, Homo sapiens
gaauccuccugauaacauca

SEQ ID NO: 3831 - RNA, 20 nt, Homo sapiens
guauccuugauguuaucagg

SEQ ID NO: 3832 - RNA, 20 nt, Homo sapiens
augacugauucugacuguag

SEQ ID NO: 3833 - RNA, 20 nt, Homo sapiens
caaguucucuucauugacca

SEQ ID NO: 3834 - RNA, 20 nt, Homo sapiens
uacuuauaauaaauaugguc

SEQ ID NO: 3835 - RNA, 20 nt, Homo sapiens
uauaaagauagccagccuag

SEQ ID NO: 3836 - RNA, 20 nt, Homo sapiens
caaauagaggccgauuuccu

SEQ ID NO: 3837 - RNA, 20 nt, Homo sapiens
acuuauaauaaauauggucc

SEQ ID NO: 3838 - RNA, 20 nt, Homo sapiens
uuuguauccuugauguuauc

SEQ ID NO: 3839 - RNA, 20 nt, Homo sapiens
ucuucauugaccaaggaaau

SEQ ID NO: 3840 - RNA, 20 nt, Homo sapiens
ugccaaaguaaucugauucc

SEQ ID NO: 3841 - RNA, 20 nt, Homo sapiens
aauguuuauuguagaaaacc

SEQ ID NO: 3842 - RNA, 20 nt, Homo sapiens
uacgcuuuacuuuauaggua

SEQ ID NO: 3843 - RNA, 20 nt, Homo sapiens
agauagccagccuagaggua

SEQ ID NO: 3844 - RNA, 20 nt, Homo sapiens
aaggcucagucuuaccuuaa

SEQ ID NO: 3845 - RNA, 20 nt, Homo sapiens
cuuggucaaugaagagaacu

SEQ ID NO: 3846 - RNA, 20 nt, Homo sapiens
auacauacuuauaauaaaua

SEQ ID NO: 3847 - RNA, 20 nt, Homo sapiens
ccccucuuagcugaagauga

SEQ ID NO: 3848 - RNA, 20 nt, Homo sapiens
aaccuggaaucagauuacuu

SEQ ID NO: 3849 - RNA, 20 nt, Homo sapiens
agacaauugcaucaacuuug

SEQ ID NO: 3850 - RNA, 21 nt, Homo sapiens
gauggugacuggcuuauugcu

SEQ ID NO: 3851 - RNA, 21 nt, Homo sapiens
ucugcuuagacacaauccuag

SEQ ID NO: 3852 - RNA, 21 nt, Homo sapiens
uagguuccaagcaggagaacc

SEQ ID NO: 3853 - RNA, 21 nt, Homo sapiens
ucgguuaagacugaugcagcc

SEQ ID NO: 3854 - RNA, 21 nt, Homo sapiens
auauguagaggcugugaucau

SEQ ID NO: 3855 - RNA, 21 nt, Homo sapiens
ugggguucaucuuaaaauagu

SEQ ID NO: 3856 - RNA, 21 nt, Homo sapiens
acaaaucuucacaaauuugug

SEQ ID NO: 3857 - RNA, 23 nt, Homo sapiens
cccaugugccgaacacucuuggc

SEQ ID NO: 3858 - RNA, 23 nt, Homo sapiens
gguuccaagcaggagaaccagga

SEQ ID NO: 3859 - RNA, 23 nt, Homo sapiens
cagguauauccggagcaauaagc

SEQ ID NO: 3860 - RNA, 23 nt, Homo sapiens
gauacccacccucccggcugcau

SEQ ID NO: 3861 - RNA, 23 nt, Homo sapiens
ucaggauccuagaaaacuucucu

SEQ ID NO: 3862 - RNA, 23 nt, Homo sapiens
guauauuacucuacauuguccca

SEQ ID NO: 3863 - RNA, 23 nt, Homo sapiens
guguccaacugaaaccaaagcaa

SEQ ID NO: 3864 - RNA, 23 nt, Homo sapiens
aaaaccggcagaguuuacccagc

SEQ ID NO: 3865 - RNA, 23 nt, Homo sapiens
gagggcugcugaaguaucaaacu

SEQ ID NO: 3866 - RNA, 23 nt, Homo sapiens
ggucaugagucaucccucagaug

SEQ ID NO: 3867 - RNA, 23 nt, Homo sapiens
uggaaaaccuucuugcuguauaa

SEQ ID NO: 3868 - RNA, 23 nt, Homo sapiens
ucaccugagaaaauacagauagu

SEQ ID NO: 3869 - RNA, 23 nt, Homo sapiens
ggcacaguacaggcacaaagguc

SEQ ID NO: 3870 - RNA, 23 nt, Homo sapiens
uauggaagagcccagauuccaag

SEQ ID NO: 3871 - RNA, 23 nt, Homo sapiens
caugacaucugagggaugacuca

SEQ ID NO: 3872 - RNA, 23 nt, Homo sapiens
uaacuaugauaucuucugguaua

SEQ ID NO: 3873 - RNA, 20 nt, Homo sapiens
uuacauaaucuggaugaagc

SEQ ID NO: 3874 - RNA, 20 nt, Homo sapiens
ggcugcugcauuacauaauc

SEQ ID NO: 3875 - RNA, 23 nt, Homo sapiens
uaaugcagauacacugggacaau

SEQ ID NO: 3876 - RNA, 23 nt, Homo sapiens
uccaacaaucuccugguucuccu

SEQ ID NO: 3877 - RNA, 23 nt, Homo sapiens
cagaguuucuaacuaugauaucu

SEQ ID NO: 3878 - RNA, 23 nt, Homo sapiens
cccagcacaaauuugugaagauu

SEQ ID NO: 3879 - RNA, 23 nt, Homo sapiens
cuuaccagaguauuucucagaac

SEQ ID NO: 3880 - RNA, 23 nt, Homo sapiens
uaguuccuggccugacagggguc

SEQ ID NO: 3881 - RNA, 23 nt, Homo sapiens
ggguucaucuuaaaauaguagga

SEQ ID NO: 3882 - RNA, 23 nt, Homo sapiens
uugaacugaaugcagcaagauac

SEQ ID NO: 3883 - RNA, 23 nt, Homo sapiens
auaucuuguggcuuucucaccug

SEQ ID NO: 3884 - RNA, 23 nt, Homo sapiens
auauuaccugugguguuacuauc

SEQ ID NO: 3885 - RNA, 23 nt, Homo sapiens
acuguaauucacugagaaguuga

SEQ ID NO: 3886 - RNA, 23 nt, Homo sapiens
ugaguauaccagaagauaucaua

SEQ ID NO: 3887 - RNA, 23 nt, Homo sapiens
augacaucugagggaugacucau

SEQ ID NO: 3888 - RNA, 23 nt, Homo sapiens
accuuacuuacccccaacaucug

SEQ ID NO: 3889 - RNA, 23 nt, Homo sapiens
ucagugaauuacagugaagacuu

SEQ ID NO: 3890 - RNA, 23 nt, Homo sapiens
uaaacuuacccugaaacaugcaa

SEQ ID NO: 3891 - RNA, 23 nt, Homo sapiens
cccugaaacaugcaacgucagca

SEQ ID NO: 3892 - RNA, 23 nt, Homo sapiens
caaaaccggcagaguuuacccag

SEQ ID NO: 3893 - RNA, 23 nt, Homo sapiens
accucaacugcagccuuauccuu

SEQ ID NO: 3894 - RNA, 23 nt, Homo sapiens
ugagagcugguucgguuaagacu

SEQ ID NO: 3895 - RNA, 23 nt, Homo sapiens
accgaaccagcucucagaauauu

SEQ ID NO: 3896 - RNA, 23 nt, Homo sapiens
ugcagaguuucuaacuaugauau

SEQ ID NO: 3897 - RNA, 23 nt, Homo sapiens
ucaugaucacagccucuacauau

SEQ ID NO: 3898 - RNA, 23 nt, Homo sapiens
uaguguccaacugaaaccaaagc

SEQ ID NO: 3899 - RNA, 23 nt, Homo sapiens
ugguauacucauaaccucuucuu

SEQ ID NO: 3900 - RNA, 20 nt, Homo sapiens
agcugacuaauuauucggug

SEQ ID NO: 3901 - RNA, 20 nt, Homo sapiens
aggagucagaugcuguuucg

SEQ ID NO: 3902 - RNA, 20 nt, Homo sapiens
caggcaggacaaccauuacu

SEQ ID NO: 3903 - RNA, 20 nt, Homo sapiens
ccagagcauccaaaagagug

SEQ ID NO: 3904 - RNA, 20 nt, Homo sapiens
gcaggcaggacaaccauuac

SEQ ID NO: 3905 - RNA, 20 nt, Homo sapiens
ugucgccagcagcuaaaaca

SEQ ID NO: 3906 - RNA, 20 nt, Homo sapiens
guucauguauugcuuugcgu

SEQ ID NO: 3907 - RNA, 20 nt, Homo sapiens
aaagaguguggagaccauca

SEQ ID NO: 3908 - RNA, 20 nt, Homo sapiens
gucgaagagcaucccaguaa

SEQ ID NO: 3909 - RNA, 20 nt, Homo sapiens
acaugaacucauccaaguga

SEQ ID NO: 3910 - RNA, 20 nt, Homo sapiens
gcgacaguucagccaucacu

SEQ ID NO: 3911 - RNA, 20 nt, Homo sapiens
cauucagauguagcggauaa

SEQ ID NO: 3912 - RNA, 20 nt, Homo sapiens
uucucuuggcuguuacugcc

SEQ ID NO: 3913 - RNA, 20 nt, Homo sapiens
gaaauauacaaguuauaucu

SEQ ID NO: 3914 - RNA, 20 nt, Homo sapiens
ugcaggucauucagauguag

SEQ ID NO: 3915 - RNA, 20 nt, Homo sapiens
cuaaaacagggaagcgaaaa

SEQ ID NO: 3916 - RNA, 20 nt, Homo sapiens
cgaaaagcugacuaauuauu

SEQ ID NO: 3917 - RNA, 20 nt, Homo sapiens
ugaaguaaaaggagacaauu

SEQ ID NO: 3918 - RNA, 20 nt, Homo sapiens
uacuuacaaaauauuucuua

SEQ ID NO: 3919 - RNA, 20 nt, Homo sapiens
gacauucaugucuuccuuga

SEQ ID NO: 3920 - RNA, 20 nt, Homo sapiens
uuuaaaaaguuugaaguaaa

SEQ ID NO: 3921 - RNA, 20 nt, Homo sapiens
cugucgccagcagcuaaaac

SEQ ID NO: 3922 - RNA, 20 nt, Homo sapiens
ugauggucuccacacucuuu

SEQ ID NO: 3923 - RNA, 20 nt, Homo sapiens
auaaauacuacuaaggcaca

SEQ ID NO: 3924 - RNA, 20 nt, Homo sapiens
uuuaccauuggaauuaacca

SEQ ID NO: 3925 - RNA, 20 nt, Homo sapiens
ggagguuucuggccaaacug

SEQ ID NO: 3926 - RNA, 20 nt, Homo sapiens
cugggucuggaguggccacg

SEQ ID NO: 3927 - RNA, 20 nt, Homo sapiens
gcgcuggacacaugcugagc

SEQ ID NO: 3928 - RNA, 20 nt, Homo sapiens
ucaaucucuucagaagugca

SEQ ID NO: 3929 - RNA, 20 nt, Homo sapiens
agauaaaaccagcacagugg

SEQ ID NO: 3930 - RNA, 20 nt, Homo sapiens
ggaccaggguagccacaagg

SEQ ID NO: 3931 - RNA, 20 nt, Homo sapiens
gugucuuaccaucauaaaag

SEQ ID NO: 3932 - RNA, 20 nt, Homo sapiens
uuuggccagaaaccuccccg

SEQ ID NO: 3933 - RNA, 20 nt, Homo sapiens
cauaaaagaggucuuucugg

SEQ ID NO: 3934 - RNA, 20 nt, Homo sapiens
ggccacaggucugcauccag

SEQ ID NO: 3935 - RNA, 20 nt, Homo sapiens
agucuucauaaauacuacua

SEQ ID NO: 3936 - RNA, 20 nt, Homo sapiens
caaucucuucagaagugcaa

SEQ ID NO: 3937 - RNA, 20 nt, Homo sapiens
ccacucccaaaaccugcuga

SEQ ID NO: 3938 - RNA, 20 nt, Homo sapiens
uauaccuugguuaauuccaa

SEQ ID NO: 3939 - RNA, 20 nt, Homo sapiens
aguggaggccuguuuaccau

SEQ ID NO: 3940 - RNA, 20 nt, Homo sapiens
ggucuggaguggccacgggg

SEQ ID NO: 3941 - RNA, 20 nt, Homo sapiens
ggaggaccaggguagccaca

SEQ ID NO: 3942 - RNA, 20 nt, Homo sapiens
uuugggaguggugaaggcau

SEQ ID NO: 3943 - RNA, 20 nt, Homo sapiens
ccaaacugaggugguccagg

SEQ ID NO: 3944 - RNA, 20 nt, Homo sapiens
gaaggcaugggaacauuccu

SEQ ID NO: 3945 - RNA, 20 nt, Homo sapiens
cccguggccacuccagaccc

SEQ ID NO: 3946 - RNA, 20 nt, Homo sapiens
uggaugcagaccuguggccg

SEQ ID NO: 3947 - RNA, 20 nt, Homo sapiens
ccucuagaaugggaguugcc

SEQ ID NO: 3948 - RNA, 20 nt, Homo sapiens
ugaggagagucugcccauug

SEQ ID NO: 3949 - RNA, 20 nt, Homo sapiens
ucugcccauugaggucaugg

SEQ ID NO: 3950 - RNA, 20 nt, Homo sapiens
ucaguucccauauggccacg

SEQ ID NO: 3951 - RNA, 20 nt, Homo sapiens
aguucccauauggccacgag

SEQ ID NO: 3952 - RNA, 20 nt, Homo sapiens
ggcauccaccaugaccucaa

SEQ ID NO: 3953 - RNA, 20 nt, Homo sapiens
ggccaguacaccugucacaa

SEQ ID NO: 3954 - RNA, 20 nt, Homo sapiens
caguacaccugucacaaagg

SEQ ID NO: 3955 - RNA, 20 nt, Homo sapiens
uaagaccuuucuaagaugcg

SEQ ID NO: 3956 - RNA, 20 nt, Homo sapiens
ugaggaccaccauuucucca

SEQ ID NO: 3957 - RNA, 20 nt, Homo sapiens
cuccgcacgucaccccuugg

SEQ ID NO: 3958 - RNA, 20 nt, Homo sapiens
gcagacucuccucagcagcu

SEQ ID NO: 3959 - RNA, 20 nt, Homo sapiens
gagagucagaggggacaaca

SEQ ID NO: 3960 - RNA, 20 nt, Homo sapiens
gacccccaaggggugacgug

SEQ ID NO: 3961 - RNA, 20 nt, Homo sapiens
gaccuuggaccagagcagug

SEQ ID NO: 3962 - RNA, 20 nt, Homo sapiens
caguucccauauggccacga

SEQ ID NO: 3963 - RNA, 20 nt, Homo sapiens
gagucugcccauugagguca

SEQ ID NO: 3964 - RNA, 20 nt, Homo sapiens
caccugucacaaaggaggcg

SEQ ID NO: 3965 - RNA, 20 nt, Homo sapiens
cugaagaagaugguaucacc

SEQ ID NO: 3966 - RNA, 20 nt, Homo sapiens
ugaguacucaguggagugcc

SEQ ID NO: 3967 - RNA, 20 nt, Homo sapiens
agaugguaucaccuggaccu

SEQ ID NO: 3968 - RNA, 20 nt, Homo sapiens
gcauccaccaugaccucaau

SEQ ID NO: 3969 - RNA, 20 nt, Homo sapiens
gaggaccaccauuucuccag

SEQ ID NO: 3970 - RNA, 20 nt, Homo sapiens
ucagugucaaaagcagcaga

SEQ ID NO: 3971 - RNA, 20 nt, Homo sapiens
gcuccgcacgucaccccuug

SEQ ID NO: 3972 - RNA, 20 nt, Homo sapiens
acaaaaaggaagauggaauu

SEQ ID NO: 3973 - RNA, 20 nt, Homo sapiens
uuaauuccaaccaaaucccg

SEQ ID NO: 3974 - RNA, 20 nt, Homo sapiens
ucuaggccgauacaaagcag

SEQ ID NO: 3975 - RNA, 20 nt, Homo sapiens
cucuaggccgauacaaagca

SEQ ID NO: 3976 - RNA, 20 nt, Homo sapiens
aggagccagaucccaagacg

SEQ ID NO: 3977 - RNA, 20 nt, Homo sapiens
gaacucccugccagauaucg

SEQ ID NO: 3978 - RNA, 20 nt, Homo sapiens
cggagcugggccauucacac

SEQ ID NO: 3979 - RNA, 20 nt, Homo sapiens
cacaguuccaggcuacaugc

SEQ ID NO: 3980 - RNA, 20 nt, Homo sapiens
ccacugggaugugccagucg

SEQ ID NO: 3981 - RNA, 20 nt, Homo sapiens
gccagaucccaagacgugga

SEQ ID NO: 3982 - RNA, 20 nt, Homo sapiens
cuggaaguuguacagaucac

SEQ ID NO: 3983 - RNA, 20 nt, Homo sapiens
guucauggcacagcgaaagu

SEQ ID NO: 3984 - RNA, 20 nt, Homo sapiens
gcucagcugugcgaguguac

SEQ ID NO: 3985 - RNA, 20 nt, Homo sapiens
cugugugaauggcccagcuc

SEQ ID NO: 3986 - RNA, 20 nt, Homo sapiens
cucccugccagauaucgagg

SEQ ID NO: 3987 - RNA, 20 nt, Homo sapiens
ccucuaggccgauacaaagc

SEQ ID NO: 3988 - RNA, 20 nt, Homo sapiens
gcugcugaguccaucagaga

SEQ ID NO: 3989 - RNA, 20 nt, Homo sapiens
cuugcucuuagcaucucggc

SEQ ID NO: 3990 - RNA, 20 nt, Homo sapiens
caggcacacaccugugugaa

SEQ ID NO: 3991 - RNA, 20 nt, Homo sapiens
gcauggcugggacaucaaca

SEQ ID NO: 3992 - RNA, 20 nt, Homo sapiens
ccccgacuggcacaucccag

SEQ ID NO: 3993 - RNA, 20 nt, Homo sapiens
uacagaucacuggugcuguc

SEQ ID NO: 3994 - RNA, 20 nt, Homo sapiens
ucagcagcacucuccccgac

SEQ ID NO: 3995 - RNA, 20 nt, Homo sapiens
uguccggcacaacuuccacu

SEQ ID NO: 3996 - RNA, 20 nt, Homo sapiens
gcuguggucaucaggcagag

SEQ ID NO: 3997 - RNA, 20 nt, Homo sapiens
cagugaucuguacaacuucc

SEQ ID NO: 3998 - RNA, 20 nt, Homo sapiens
accucuccggacaccaaugg

SEQ ID NO: 3999 - RNA, 20 nt, Homo sapiens
ggggagugaugagcuacgug

SEQ ID NO: 4000 - RNA, 20 nt, Homo sapiens
gaggugacagccuucuaccg

SEQ ID NO: 4001 - RNA, 20 nt, Homo sapiens
guuacuggguaacauggugu

SEQ ID NO: 4002 - RNA, 20 nt, Homo sapiens
gacaccucuccggacaccaa

SEQ ID NO: 4003 - RNA, 20 nt, Homo sapiens
ccacuggugcauauguuccc

SEQ ID NO: 4004 - RNA, 20 nt, Homo sapiens
cccgggaacauaugcaccag

SEQ ID NO: 4005 - RNA, 20 nt, Homo sapiens
aggcaguacuucugauaccc

SEQ ID NO: 4006 - RNA, 20 nt, Homo sapiens
agaaggguugcguuuagcag

SEQ ID NO: 4007 - RNA, 20 nt, Homo sapiens
ggaugaguuacuggguaaca

SEQ ID NO: 4008 - RNA, 20 nt, Homo sapiens
cuggugcauauguucccggg

SEQ ID NO: 4009 - RNA, 20 nt, Homo sapiens
gagugggauuguccaagcug

SEQ ID NO: 4010 - RNA, 20 nt, Homo sapiens
ccacucccuucccaaaccug

SEQ ID NO: 4011 - RNA, 20 nt, Homo sapiens
uggugcauauguucccggga

SEQ ID NO: 4012 - RNA, 20 nt, Homo sapiens
gaacccacugaagcggcugu

SEQ ID NO: 4013 - RNA, 20 nt, Homo sapiens
aucuacgaguuugugaacuc

SEQ ID NO: 4014 - RNA, 20 nt, Homo sapiens
ucccuuggaagcacggccua

SEQ ID NO: 4015 - RNA, 20 nt, Homo sapiens
gacauucuggaugaguuacu

SEQ ID NO: 4016 - RNA, 20 nt, Homo sapiens
gguugcguuuagcagaggac

SEQ ID NO: 4017 - RNA, 20 nt, Homo sapiens
cagcguccugucucccacuu

SEQ ID NO: 4018 - RNA, 20 nt, Homo sapiens
ggcaccaacagccgcuucag

SEQ ID NO: 4019 - RNA, 20 nt, Homo sapiens
ccucugagaacccacugaag

SEQ ID NO: 4020 - RNA, 20 nt, Homo sapiens
gcaccaacagccgcuucagu

SEQ ID NO: 4021 - RNA, 20 nt, Homo sapiens
ggcaugucccugacagacag

SEQ ID NO: 4022 - RNA, 20 nt, Homo sapiens
gggucccggaucugggagug

SEQ ID NO: 4023 - RNA, 20 nt, Homo sapiens
gaugcacucaccuugcaccg

SEQ ID NO: 4024 - RNA, 20 nt, Homo sapiens
gaugcugcgggauaacucgg

SEQ ID NO: 4025 - RNA, 20 nt, Homo sapiens
ggcagauccagucccaacca

SEQ ID NO: 4026 - RNA, 20 nt, Homo sapiens
ugaugcugcgggauaacucg

SEQ ID NO: 4027 - RNA, 20 nt, Homo sapiens
ucugcugacagcgucauggg

SEQ ID NO: 4028 - RNA, 20 nt, Homo sapiens
uugcgcgcgaagugcuucca

SEQ ID NO: 4029 - RNA, 20 nt, Homo sapiens
cugagcgcguacaccuugug

SEQ ID NO: 4030 - RNA, 20 nt, Homo sapiens
gacgugaccaucauguacaa

SEQ ID NO: 4031 - RNA, 20 nt, Homo sapiens
gggcacgcggaaacaggugc

SEQ ID NO: 4032 - RNA, 20 nt, Homo sapiens
caccuugaagaugcgcgcgu

SEQ ID NO: 4033 - RNA, 20 nt, Homo sapiens
cuccccaagcgccugcaccg

SEQ ID NO: 4034 - RNA, 20 nt, Homo sapiens
agaagggcuuccccugacug

SEQ ID NO: 4035 - RNA, 20 nt, Homo sapiens
agggcacgcggaaacaggug

SEQ ID NO: 4036 - RNA, 20 nt, Homo sapiens
cccaggcacggaccagacug

SEQ ID NO: 4037 - RNA, 20 nt, Homo sapiens
ugagcgcguacaccuugugc

SEQ ID NO: 4038 - DNA, 20 bp, Homo sapiens
ggacccggccgacccgcaca

SEQ ID NO: 4039 - RNA, 20 nt, Homo sapiens
cgugcggcccuuguacauga

SEQ ID NO: 4040 - RNA, 20 nt, Homo sapiens
accaucugcugacagcguca

SEQ ID NO: 4041 - RNA, 20 nt, Homo sapiens
gcgugcugcgcagugcgcag

SEQ ID NO: 4042 - RNA, 20 nt, Homo sapiens
cgacgcgcgcaucuucaagg

SEQ ID NO: 4043 - RNA, 20 nt, Homo sapiens
ucagcagcggcugcuaugag

SEQ ID NO: 4044 - RNA, 20 nt, Homo sapiens
uccgcagucucagccucggg

SEQ ID NO: 4045 - RNA, 20 nt, Homo sapiens
ccguauaggaacgugcagcu

SEQ ID NO: 4046 - RNA, 20 nt, Homo sapiens
cugccccagcuggugacaag

SEQ ID NO: 4047 - RNA, 20 nt, Homo sapiens
ucugguccgggagcucggca

SEQ ID NO: 4048 - RNA, 20 nt, Homo sapiens
guuccggaaccaaugcacag

SEQ ID NO: 4049 - RNA, 20 nt, Homo sapiens
gugcauugguuccggaaccg

SEQ ID NO: 4050 - RNA, 20 nt, Homo sapiens
gggaguuacccagaacagug

SEQ ID NO: 4051 - RNA, 20 nt, Homo sapiens
cgucccgccccacauacucg

SEQ ID NO: 4052 - RNA, 20 nt, Homo sapiens
gcucacauccucuagucgaa

SEQ ID NO: 4053 - RNA, 20 nt, Homo sapiens
guucaaaaugacccagucgg

SEQ ID NO: 4054 - RNA, 20 nt, Homo sapiens
uuccgcuaaguggugauggg

SEQ ID NO: 4055 - RNA, 20 nt, Homo sapiens
gcaguucaaaaugacccagu

SEQ ID NO: 4056 - RNA, 20 nt, Homo sapiens
agaggaagcuuuccgcuaag

SEQ ID NO: 4057 - RNA, 20 nt, Homo sapiens
gacguugaagccaucucugu

SEQ ID NO: 4058 - RNA, 20 nt, Homo sapiens
cgacuuuacccuucgacuag

SEQ ID NO: 4059 - RNA, 20 nt, Homo sapiens
gcggucccugaggugcaccg

SEQ ID NO: 4060 - RNA, 20 nt, Homo sapiens
cucagcaccguguagcggcg

SEQ ID NO: 4061 - RNA, 20 nt, Homo sapiens
gaggaguccacuuggcagug

SEQ ID NO: 4062 - RNA, 20 nt, Homo sapiens
uuccugcagauggauauggc

SEQ ID NO: 4063 - RNA, 20 nt, Homo sapiens
ucagccuucugcgaagagca

SEQ ID NO: 4064 - RNA, 20 nt, Homo sapiens
acucccuugacaguguacgc

SEQ ID NO: 4065 - RNA, 20 nt, Homo sapiens
ggaaccaaugcacagaggcu

SEQ ID NO: 4066 - RNA, 20 nt, Homo sapiens
ggucuuuccucacugccaag

SEQ ID NO: 4067 - RNA, 20 nt, Homo sapiens
acuuggcagugaggaaagac

SEQ ID NO: 4068 - RNA, 20 nt, Homo sapiens
ggcucacauccucuagucga

SEQ ID NO: 4069 - RNA, 20 nt, Homo sapiens
gcuccagcguacacugucaa

SEQ ID NO: 4070 - RNA, 20 nt, Homo sapiens
agcgcggggacuucucgcua

SEQ ID NO: 4071 - RNA, 20 nt, Homo sapiens
gaguccauggggcugacuug

SEQ ID NO: 4072 - RNA, 20 nt, Homo sapiens
cccuccugggcccacaccac

SEQ ID NO: 4073 - RNA, 20 nt, Homo sapiens
aagcuguucaugucaccaca

SEQ ID NO: 4074 - RNA, 20 nt, Homo sapiens
uaugacuucuaucccaacgg

SEQ ID NO: 4075 - RNA, 20 nt, Homo sapiens
aaggugcaccgaucgcucgu

SEQ ID NO: 4076 - RNA, 20 nt, Homo sapiens
uggugaugauaauccacggg

SEQ ID NO: 4077 - RNA, 20 nt, Homo sapiens
cuggagaaagacgauugcug

SEQ ID NO: 4078 - RNA, 20 nt, Homo sapiens
cauuuccuaccgaccacccg

SEQ ID NO: 4079 - RNA, 20 nt, Homo sapiens
gaugauaauccacggguggu

SEQ ID NO: 4080 - RNA, 20 nt, Homo sapiens
ucccucaaacaaaggucccg

SEQ ID NO: 4081 - RNA, 20 nt, Homo sapiens
auaauccacggguggucggu

SEQ ID NO: 4082 - RNA, 20 nt, Homo sapiens
ccguggauuaucaucaccag

SEQ ID NO: 4083 - RNA, 20 nt, Homo sapiens
gugggcaucaaacagcccau

SEQ ID NO: 4084 - RNA, 20 nt, Homo sapiens
cuuggacaaagccugaaacc

SEQ ID NO: 4085 - RNA, 20 nt, Homo sapiens
agcuguucaugucaccacac

SEQ ID NO: 4086 - RNA, 20 nt, Homo sapiens
guucaugucaccacacgggu

SEQ ID NO: 4087 - RNA, 20 nt, Homo sapiens
uggagaaagacgauugcugg

SEQ ID NO: 4088 - RNA, 20 nt, Homo sapiens
ccggcccagccagugaacgu

SEQ ID NO: 4089 - RNA, 20 nt, Homo sapiens
auccugacacgugugcaccc

SEQ ID NO: 4090 - RNA, 20 nt, Homo sapiens
cuaugacuucuaucccaacg

SEQ ID NO: 4091 - RNA, 20 nt, Homo sapiens
ugccauucauaccuuuaccc

SEQ ID NO: 4092 - RNA, 20 nt, Homo sapiens
gacaugaacagcuucagcca

SEQ ID NO: 4093 - RNA, 20 nt, Homo sapiens
aaucuugugcguuccaccga

SEQ ID NO: 4094 - RNA, 20 nt, Homo sapiens
aaaaugcucccacgagcgau

SEQ ID NO: 4095 - RNA, 20 nt, Homo sapiens
ccgcacuccuguaacguguc

SEQ ID NO: 4096 - RNA, 20 nt, Homo sapiens
cucuuuggagaaaccaauca

SEQ ID NO: 4097 - RNA, 20 nt, Homo sapiens
cacccgccuugugggcaagg

SEQ ID NO: 4098 - RNA, 20 nt, Homo sapiens
uuggacucgggaauucgugg

SEQ ID NO: 4099 - RNA, 20 nt, Homo sapiens
cuuggacauaacagcaacau

SEQ ID NO: 4100 - RNA, 20 nt, Homo sapiens
ugaguuccaaaaucugacau

SEQ ID NO: 4101 - RNA, 20 nt, Homo sapiens
cgaauucccgaguccaacca

SEQ ID NO: 4102 - RNA, 20 nt, Homo sapiens
agcguucucaaacgauggag

SEQ ID NO: 4103 - RNA, 20 nt, Homo sapiens
aguaccugaaucacuuccca

SEQ ID NO: 4104 - RNA, 20 nt, Homo sapiens
ggugaugaugaguauuguga

SEQ ID NO: 4105 - RNA, 20 nt, Homo sapiens
acaaguugaugguccucaag

SEQ ID NO: 4106 - RNA, 20 nt, Homo sapiens
ucaugagcguucucaaacga

SEQ ID NO: 4107 - RNA, 20 nt, Homo sapiens
caguguauaauaacaucaug

SEQ ID NO: 4108 - RNA, 20 nt, Homo sapiens
aacuucuagaaauaaugaca

SEQ ID NO: 4109 - RNA, 20 nt, Homo sapiens
ucagacacaaguuuggcaga

SEQ ID NO: 4110 - RNA, 20 nt, Homo sapiens
ucuuggacauaacagcaaca

SEQ ID NO: 4111 - RNA, 20 nt, Homo sapiens
uuagucccaguaucugagga

SEQ ID NO: 4112 - RNA, 20 nt, Homo sapiens
cucaggguucauguagcggg

SEQ ID NO: 4113 - RNA, 20 nt, Homo sapiens
uaucguguuauuggauuaag

SEQ ID NO: 4114 - RNA, 20 nt, Homo sapiens
gcuguuagucccaguaucug

SEQ ID NO: 4115 - RNA, 20 nt, Homo sapiens
gaugcugguguucaauuguc

SEQ ID NO: 4116 - RNA, 20 nt, Homo sapiens
aaucagagccuguuaacucu

SEQ ID NO: 4117 - RNA, 20 nt, Homo sapiens
gagcucaggguucauguagc

SEQ ID NO: 4118 - RNA, 20 nt, Homo sapiens
ucaacugaaaaaccaaauac

SEQ ID NO: 4119 - RNA, 20 nt, Homo sapiens
gcguucucaaacgauggaga

SEQ ID NO: 4120 - RNA, 20 nt, Homo sapiens
auugaagacagaaaccgggu

SEQ ID NO: 4121 - RNA, 20 nt, Homo sapiens
ggcaauguaaacagccacuc

SEQ ID NO: 4122 - RNA, 20 nt, Homo sapiens
caucaagauuggcacauagc

SEQ ID NO: 4123 - RNA, 20 nt, Homo sapiens
gccuacaggaguaugaugca

SEQ ID NO: 4124 - RNA, 20 nt, Homo sapiens
aaugugaccgauuucaccag

SEQ ID NO: 4125 - RNA, 20 nt, Homo sapiens
uggauuacaaagcugacgag

SEQ ID NO: 4126 - RNA, 20 nt, Homo sapiens
gagucaggaucucauaucug

SEQ ID NO: 4127 - RNA, 20 nt, Homo sapiens
acaggaguaugaugcaaggu

SEQ ID NO: 4128 - RNA, 20 nt, Homo sapiens
cugcaggucaaguucaacga

SEQ ID NO: 4129 - RNA, 20 nt, Homo sapiens
gcugcaggucaaguucaacg

SEQ ID NO: 4130 - RNA, 20 nt, Homo sapiens
gggacgggauuacguccaga

SEQ ID NO: 4131 - RNA, 20 nt, Homo sapiens
gaagcagaaacgggaccuug

SEQ ID NO: 4132 - RNA, 20 nt, Homo sapiens
agagaucugccaugaccuag

SEQ ID NO: 4133 - RNA, 20 nt, Homo sapiens
caagcucaagaacaagcaug

SEQ ID NO: 4134 - RNA, 20 nt, Homo sapiens
acuccaaacuccauucccaa

SEQ ID NO: 4135 - RNA, 20 nt, Homo sapiens
cugaguaguaacgcuccuug

SEQ ID NO: 4136 - RNA, 20 nt, Homo sapiens
cauccaguaucuggcguacg

SEQ ID NO: 4137 - RNA, 20 nt, Homo sapiens
uacaggaguaugaugcaagg

SEQ ID NO: 4138 - RNA, 20 nt, Homo sapiens
gaagggcauguuccgcacug

SEQ ID NO: 4139 - RNA, 20 nt, Homo sapiens
gcguccaugcccgacaacac

SEQ ID NO: 4140 - RNA, 20 nt, Homo sapiens
cuccgagacaaacuugucag

SEQ ID NO: 4141 - RNA, 20 nt, Homo sapiens
ccgcuggaggaccuucaugg

SEQ ID NO: 4142 - RNA, 20 nt, Homo sapiens
cacacagagcauuugccaag

SEQ ID NO: 4143 - RNA, 20 nt, Homo sapiens
ccaucacagacaccgccuac

SEQ ID NO: 4144 - RNA, 20 nt, Homo sapiens
ugugauggcauagaugugag

SEQ ID NO: 4145 - RNA, 20 nt, Homo sapiens
auggacacgucaccaucccc

SEQ ID NO: 4146 - RNA, 20 nt, Homo sapiens
cuucuauuaucuccugucug

SEQ ID NO: 4147 - RNA, 20 nt, Homo sapiens
gcgcugccuaccugaagcug

SEQ ID NO: 4148 - RNA, 20 nt, Homo sapiens
aggaaacaacagcuaaccgg

SEQ ID NO: 4149 - RNA, 20 nt, Homo sapiens
uuggcaauugguaacaccag

SEQ ID NO: 4150 - RNA, 20 nt, Homo sapiens
acuggacaaaucauuaagug

SEQ ID NO: 4151 - RNA, 20 nt, Homo sapiens
acaccucgugaacuguaaug

SEQ ID NO: 4152 - RNA, 20 nt, Homo sapiens
cuagcagcaauauugcaccu

SEQ ID NO: 4153 - RNA, 20 nt, Homo sapiens
ggaggcauuagcuugaccug

SEQ ID NO: 4154 - RNA, 20 nt, Homo sapiens
ccuuccugcguagugcauga

SEQ ID NO: 4155 - RNA, 20 nt, Homo sapiens
ggccauauuuggcugccaag

SEQ ID NO: 4156 - RNA, 20 nt, Homo sapiens
gguucuuaccagauggagca

SEQ ID NO: 4157 - RNA, 20 nt, Homo sapiens
guaggcacaaaucauugagu

SEQ ID NO: 4158 - RNA, 20 nt, Homo sapiens
guauuugaaccagaccauac

SEQ ID NO: 4159 - RNA, 20 nt, Homo sapiens
ggaaggauaggcagauacga

SEQ ID NO: 4160 - RNA, 20 nt, Homo sapiens
uuaauaauuuaugugcacac

SEQ ID NO: 4161 - RNA, 20 nt, Homo sapiens
gugugcgaguggcuacaagg

SEQ ID NO: 4162 - RNA, 20 nt, Homo sapiens
caccauagcaucacaacuca

SEQ ID NO: 4163 - RNA, 20 nt, Homo sapiens
gcuaaacaaacgacuguaca

SEQ ID NO: 4164 - RNA, 20 nt, Homo sapiens
aggaggcauuagcuugaccu

SEQ ID NO: 4165 - RNA, 20 nt, Homo sapiens
gcagggcagacuuauguccu

SEQ ID NO: 4166 - RNA, 20 nt, Homo sapiens
ccaucaugcacuacgcagga

SEQ ID NO: 4167 - RNA, 20 nt, Homo sapiens
gacaauaucaggguuaucgc

SEQ ID NO: 4168 - RNA, 20 nt, Homo sapiens
acaggaugaugcauccacag

SEQ ID NO: 4169 - RNA, 20 nt, Homo sapiens
ucgguuuacugcccugaaug

SEQ ID NO: 4170 - RNA, 20 nt, Homo sapiens
uucaccaucaugcacuacgc

SEQ ID NO: 4171 - RNA, 20 nt, Homo sapiens
uuugcuuguuaacccauaca

SEQ ID NO: 4172 - RNA, 20 nt, Homo sapiens
acagucaagaugaacagaaa

SEQ ID NO: 4173 - RNA, 20 nt, Homo sapiens
cagacuaaggacccgcccag

SEQ ID NO: 4174 - RNA, 20 nt, Homo sapiens
ugugcuuggccaaagcaucg

SEQ ID NO: 4175 - RNA, 20 nt, Homo sapiens
aaauggaagacauuccauca

SEQ ID NO: 4176 - RNA, 20 nt, Homo sapiens
accaugcagagauacgugcg

SEQ ID NO: 4177 - RNA, 20 nt, Homo sapiens
ggaaaccauccgaaucagug

SEQ ID NO: 4178 - RNA, 20 nt, Homo sapiens
uuuaauuacacaaaacaagg

SEQ ID NO: 4179 - RNA, 20 nt, Homo sapiens
aaagcuuuguuugauagacg

SEQ ID NO: 4180 - RNA, 20 nt, Homo sapiens
uccagaagaccauccgaggg

SEQ ID NO: 4181 - RNA, 20 nt, Homo sapiens
gaaagaaguaccuacgcaug

SEQ ID NO: 4182 - RNA, 20 nt, Homo sapiens
acuggaauaugagucacuca

SEQ ID NO: 4183 - RNA, 20 nt, Homo sapiens
gauaggccacuugaccggca

SEQ ID NO: 4184 - RNA, 20 nt, Homo sapiens
gauacagcgcacauagugag

SEQ ID NO: 4185 - RNA, 20 nt, Homo sapiens
guaagacugaagaacgauag

SEQ ID NO: 4186 - RNA, 20 nt, Homo sapiens
aggaacaaugacauguccag

SEQ ID NO: 4187 - RNA, 20 nt, Homo sapiens
caaaaucgaggcucgcucag

SEQ ID NO: 4188 - RNA, 20 nt, Homo sapiens
gauucuauaagauuaauaca

SEQ ID NO: 4189 - RNA, 20 nt, Homo sapiens
uagcuacuaggacuauaccu

SEQ ID NO: 4190 - RNA, 20 nt, Homo sapiens
aucauucagaagcgaguccg

SEQ ID NO: 4191 - RNA, 20 nt, Homo sapiens
aagcgaaaguugccacuggg

SEQ ID NO: 4192 - RNA, 20 nt, Homo sapiens
cacaguugcaaaguaucgca

SEQ ID NO: 4193 - RNA, 20 nt, Homo sapiens
gaaguaccuacgcaugcgga

SEQ ID NO: 4194 - RNA, 20 nt, Homo sapiens
auagcuacuaggacuauacc

SEQ ID NO: 4195 - RNA, 20 nt, Homo sapiens
gaaauagguaucgcaaggug

SEQ ID NO: 4196 - RNA, 20 nt, Homo sapiens
aggaagcgaaaguugccacu

SEQ ID NO: 4197 - RNA, 20 nt, Homo sapiens
aaaguacuggcgcauguaug

SEQ ID NO: 4198 - RNA, 20 nt, Homo sapiens
cccagugaaguaaaacccag

SEQ ID NO: 4199 - RNA, 20 nt, Homo sapiens
guacagcucauggauaccac

SEQ ID NO: 4200 - RNA, 20 nt, Homo sapiens
cagccucugagagcacacaa

SEQ ID NO: 4201 - RNA, 20 nt, Homo sapiens
auuuccuaaacauccaccac

SEQ ID NO: 4202 - RNA, 20 nt, Homo sapiens
auauauagguaaacaggaca

SEQ ID NO: 4203 - RNA, 20 nt, Homo sapiens
agccucugagagcacacaag

SEQ ID NO: 4204 - RNA, 20 nt, Homo sapiens
aaucuggaugaaaccucuug

SEQ ID NO: 4205 - RNA, 20 nt, Homo sapiens
ggcugagaggagguaaaaug

SEQ ID NO: 4206 - RNA, 20 nt, Homo sapiens
uccccauagaagaccacaag

SEQ ID NO: 4207 - RNA, 20 nt, Homo sapiens
auggauaccacaggagaugg

SEQ ID NO: 4208 - RNA, 20 nt, Homo sapiens
cuucuauggggagucucgug

SEQ ID NO: 4209 - RNA, 20 nt, Homo sapiens
agaaggagaugauccuugga

SEQ ID NO: 4210 - RNA, 20 nt, Homo sapiens
gcacacaaggggauaucccu

SEQ ID NO: 4211 - RNA, 20 nt, Homo sapiens
auaaaauggccaguuccuga

SEQ ID NO: 4212 - RNA, 20 nt, Homo sapiens
auccccuugugugcucucag

SEQ ID NO: 4213 - RNA, 20 nt, Homo sapiens
cucauggauaccacaggaga

SEQ ID NO: 4214 - RNA, 20 nt, Homo sapiens
cuguuacugaaaugugcgug

SEQ ID NO: 4215 - RNA, 20 nt, Homo sapiens
cuuaugagccguacagcuca

SEQ ID NO: 4216 - RNA, 20 nt, Homo sapiens
aguuccaccagaccagacga

SEQ ID NO: 4217 - RNA, 20 nt, Homo sapiens
guuccaccagaccagacgag

SEQ ID NO: 4218 - RNA, 20 nt, Homo sapiens
agauaucaagcaaagacaug

SEQ ID NO: 4219 - RNA, 20 nt, Homo sapiens
caaggccagcucaccacagg

SEQ ID NO: 4220 - RNA, 20 nt, Homo sapiens
uaggcgcuuacagucaucau

SEQ ID NO: 4221 - RNA, 20 nt, Homo sapiens
accauugaaaaguaagcuug

SEQ ID NO: 4222 - RNA, 20 nt, Homo sapiens
uauacagacaguauuauaaa

SEQ ID NO: 4223 - RNA, 20 nt, Homo sapiens
ucggacuuuccaucgccaag

SEQ ID NO: 4224 - RNA, 20 nt, Homo sapiens
ggauguguccagcgugaaug

SEQ ID NO: 4225 - RNA, 20 nt, Homo sapiens
agaagucaaauaaguaaucg

SEQ ID NO: 4226 - RNA, 20 nt, Homo sapiens
gcaguucgaaaucaaacuug

SEQ ID NO: 4227 - RNA, 20 nt, Homo sapiens
cguguugauacacugcugcg

SEQ ID NO: 4228 - RNA, 20 nt, Homo sapiens
aaagcuuauauaucaacuca

SEQ ID NO: 4229 - RNA, 20 nt, Homo sapiens
ccacuaccacugagugccug

SEQ ID NO: 4230 - RNA, 20 nt, Homo sapiens
uuugagcuguauauuuacag

SEQ ID NO: 4231 - RNA, 20 nt, Homo sapiens
caucacuugugcaauccaga

SEQ ID NO: 4232 - RNA, 20 nt, Homo sapiens
caggacauccucauucacgc

SEQ ID NO: 4233 - RNA, 20 nt, Homo sapiens
ccuucacagaaccuguccug

SEQ ID NO: 4234 - RNA, 20 nt, Homo sapiens
cauccgagaagugcugauca

SEQ ID NO: 4235 - RNA, 20 nt, Homo sapiens
ucuguaaauauacagcucaa

SEQ ID NO: 4236 - RNA, 20 nt, Homo sapiens
aggauguccugcugacaacu

SEQ ID NO: 4237 - RNA, 20 nt, Homo sapiens
auucggagccuggaccacug

SEQ ID NO: 4238 - RNA, 20 nt, Homo sapiens
uggcgauggaaaguccgaga

SEQ ID NO: 4239 - RNA, 20 nt, Homo sapiens
aaugucaauaucuucaccaa

SEQ ID NO: 4240 - RNA, 20 nt, Homo sapiens
ccacuguggagaccuagcuc

SEQ ID NO: 4241 - RNA, 20 nt, Homo sapiens
uaaugucaauaucuucacca

SEQ ID NO: 4242 - RNA, 20 nt, Homo sapiens
uauccaggaguugaucacag

SEQ ID NO: 4243 - RNA, 20 nt, Homo sapiens
acccacagguguaccggagc

SEQ ID NO: 4244 - RNA, 20 nt, Homo sapiens
caaacugccguaugugccuc

SEQ ID NO: 4245 - RNA, 20 nt, Homo sapiens
ccuuaagggauuuaagaaag

SEQ ID NO: 4246 - RNA, 20 nt, Homo sapiens
agaaaccuacauucccagca

SEQ ID NO: 4247 - RNA, 20 nt, Homo sapiens
cugcaaguaaccauuccccu

SEQ ID NO: 4248 - RNA, 20 nt, Homo sapiens
ggugccuuugacgagcacau

SEQ ID NO: 4249 - RNA, 20 nt, Homo sapiens
aaaagagaugagccgaagug

SEQ ID NO: 4250 - RNA, 20 nt, Homo sapiens
guucuauauccacugucgag

SEQ ID NO: 4251 - RNA, 20 nt, Homo sapiens
uucugccagucagugcagag

SEQ ID NO: 4252 - RNA, 20 nt, Homo sapiens
caaggcucaccucucgacag

SEQ ID NO: 4253 - RNA, 20 nt, Homo sapiens
agagauugaucucaaucuug

SEQ ID NO: 4254 - RNA, 20 nt, Homo sapiens
gaagacaggaaugcccgucu

SEQ ID NO: 4255 - RNA, 20 nt, Homo sapiens
ggggcugcagcaaacuggaa

SEQ ID NO: 4256 - RNA, 20 nt, Homo sapiens
gaucgcagcgaagauccaca

SEQ ID NO: 4257 - RNA, 20 nt, Homo sapiens
aaggaaggacgaacguucca

SEQ ID NO: 4258 - RNA, 20 nt, Homo sapiens
aaugaucgacuucaaugggg

SEQ ID NO: 4259 - RNA, 20 nt, Homo sapiens
gcucaucaccacgagaccug

SEQ ID NO: 4260 - RNA, 20 nt, Homo sapiens
gaagacguacaccgcggugg

SEQ ID NO: 4261 - RNA, 20 nt, Homo sapiens
auugaagucgaucauuagcg

SEQ ID NO: 4262 - RNA, 20 nt, Homo sapiens
guucuccugaaucagacuga

SEQ ID NO: 4263 - RNA, 20 nt, Homo sapiens
cacacgauccagcagaccag

SEQ ID NO: 4264 - RNA, 20 nt, Homo sapiens
aggugagccuugugacacag

SEQ ID NO: 4265 - RNA, 20 nt, Homo sapiens
caguccaugauuccugaggu

SEQ ID NO: 4266 - RNA, 20 nt, Homo sapiens
cuguuuguacgagaugcagg

SEQ ID NO: 4267 - RNA, 20 nt, Homo sapiens
cggggacacucuaccaagac

SEQ ID NO: 4268 - RNA, 20 nt, Homo sapiens
aaucuuggggaaauagucca

SEQ ID NO: 4269 - RNA, 20 nt, Homo sapiens
acuauggcaaauucgaaaag

SEQ ID NO: 4270 - RNA, 20 nt, Homo sapiens
ccagaaggacugucacgucu

SEQ ID NO: 4271 - RNA, 20 nt, Homo sapiens
gaaucccacugugauaugcc

SEQ ID NO: 4272 - RNA, 20 nt, Homo sapiens
ggagauccuggguuucuccg

SEQ ID NO: 4273 - RNA, 20 nt, Homo sapiens
caauccauucgcuuucaccg

SEQ ID NO: 4274 - RNA, 20 nt, Homo sapiens
ccaaguacccuuauuccaga

SEQ ID NO: 4275 - RNA, 20 nt, Homo sapiens
agguuaacaggacacgguca

SEQ ID NO: 4276 - RNA, 20 nt, Homo sapiens
cgaucuucacaccgucccag

SEQ ID NO: 4277 - RNA, 20 nt, Homo sapiens
accggccagccauugucagg

SEQ ID NO: 4278 - RNA, 20 nt, Homo sapiens
uggccaaaccacucucugug

SEQ ID NO: 4279 - RNA, 20 nt, Homo sapiens
cagguggcacaaaccgugca

SEQ ID NO: 4280 - RNA, 20 nt, Homo sapiens
cuggccugccacaauugaag

SEQ ID NO: 4281 - RNA, 20 nt, Homo sapiens
agccaagagaaaugucauca

SEQ ID NO: 4282 - RNA, 20 nt, Homo sapiens
ggccugucagaagcucaucg

SEQ ID NO: 4283 - RNA, 20 nt, Homo sapiens
cucuccugggaggacuacga

SEQ ID NO: 4284 - RNA, 20 nt, Homo sapiens
uuaacaggacacggucaggg

SEQ ID NO: 4285 - RNA, 20 nt, Homo sapiens
gacaccauccaugagaagac

SEQ ID NO: 4286 - RNA, 20 nt, Homo sapiens
ccugaggaacgccgacacag

SEQ ID NO: 4287 - RNA, 20 nt, Homo sapiens
gaagcccuugagguugaacu

SEQ ID NO: 4288 - RNA, 20 nt, Homo sapiens
ucaggaauuaccagucccau

SEQ ID NO: 4289 - RNA, 20 nt, Homo sapiens
acugagugccagguagaacg

SEQ ID NO: 4290 - RNA, 20 nt, Homo sapiens
caguguccgcaucgucauug

SEQ ID NO: 4291 - RNA, 20 nt, Homo sapiens
caucaaagguuaacaggaca

SEQ ID NO: 4292 - RNA, 20 nt, Homo sapiens
cauaucuguaguggucuuug

SEQ ID NO: 4293 - RNA, 20 nt, Homo sapiens
aguccgcacagagagugguu

SEQ ID NO: 4294 - RNA, 20 nt, Homo sapiens
cgcaccgaguucaaccucaa

SEQ ID NO: 4295 - RNA, 20 nt, Homo sapiens
aggugucugagcaaagcugg

SEQ ID NO: 4296 - RNA, 20 nt, Homo sapiens
cugggacccagucuucuucg

SEQ ID NO: 4297 - DNA, 20 bp, Homo sapiens
acgccgacacagcggccgga

SEQ ID NO: 4298 - RNA, 20 nt, Homo sapiens
ggagugggugacaaaaggga

SEQ ID NO: 4299 - RNA, 20 nt, Homo sapiens
gugaauggcacaacaggaga

SEQ ID NO: 4300 - RNA, 20 nt, Homo sapiens
cuuacucuuuaccccuguca

SEQ ID NO: 4301 - RNA, 20 nt, Homo sapiens
gaucaggugauaauucacgu

SEQ ID NO: 4302 - RNA, 20 nt, Homo sapiens
guaauaaaauggcagggcag

SEQ ID NO: 4303 - RNA, 20 nt, Homo sapiens
aguuacccauucucagucau

SEQ ID NO: 4304 - RNA, 20 nt, Homo sapiens
caccguucuuccucaagcca

SEQ ID NO: 4305 - RNA, 20 nt, Homo sapiens
acugaauuucagcccuugga

SEQ ID NO: 4306 - RNA, 20 nt, Homo sapiens
auucucagucauuggcguga

SEQ ID NO: 4307 - RNA, 20 nt, Homo sapiens
uuccucaagccauggaccaa

SEQ ID NO: 4308 - RNA, 20 nt, Homo sapiens
auaagauccccaccuuccaa

SEQ ID NO: 4309 - RNA, 20 nt, Homo sapiens
uucaguaauuggucaguaug

SEQ ID NO: 4310 - RNA, 20 nt, Homo sapiens
cucuuuaccccugucaaggc

SEQ ID NO: 4311 - RNA, 20 nt, Homo sapiens
ugaacagugaauggcacaac

SEQ ID NO: 4312 - RNA, 20 nt, Homo sapiens
ucacgccaaugacugagaau

SEQ ID NO: 4313 - RNA, 20 nt, Homo sapiens
gugcugaggaguuguuggau

SEQ ID NO: 4314 - RNA, 20 nt, Homo sapiens
acugagcuugaaggagucac

SEQ ID NO: 4315 - RNA, 20 nt, Homo sapiens
ucacccacuccucugcaacc

SEQ ID NO: 4316 - RNA, 20 nt, Homo sapiens
cucuuuguuugaacagugaa

SEQ ID NO: 4317 - RNA, 20 nt, Homo sapiens
uaccuuugguccauggcuug

SEQ ID NO: 4318 - RNA, 20 nt, Homo sapiens
ucgccagguugcagaggagu

SEQ ID NO: 4319 - RNA, 20 nt, Homo sapiens
ucacauuccugccuugacag

SEQ ID NO: 4320 - RNA, 20 nt, Homo sapiens
gauacagaucucuuagacuu

SEQ ID NO: 4321 - RNA, 20 nt, Homo sapiens
agagcgucgccagguugcag

SEQ ID NO: 4322 - RNA, 20 nt, Homo sapiens
uuaccucauccaccccaaaa

SEQ ID NO: 4323 - RNA, 20 nt, Homo sapiens
guacaacaccucgucgccga

SEQ ID NO: 4324 - RNA, 20 nt, Homo sapiens
uacaucuucgagaucgaggg

SEQ ID NO: 4325 - RNA, 20 nt, Homo sapiens
uggcggggaacaccaucaug

SEQ ID NO: 4326 - RNA, 20 nt, Homo sapiens
cuggagggagugauuccaca

SEQ ID NO: 4327 - RNA, 20 nt, Homo sapiens
ccugagccacaaccagcugu

SEQ ID NO: 4328 - RNA, 20 nt, Homo sapiens
gucaggaaacgcccugacgg

SEQ ID NO: 4329 - RNA, 20 nt, Homo sapiens
ucagcuacaacguccuggag

SEQ ID NO: 4330 - RNA, 20 nt, Homo sapiens
uguuccuagcauuggcgaag

SEQ ID NO: 4331 - RNA, 20 nt, Homo sapiens
cuggacgacuccgucuucga

SEQ ID NO: 4332 - RNA, 20 nt, Homo sapiens
gagaucugcgaggucgcugg

SEQ ID NO: 4333 - RNA, 20 nt, Homo sapiens
guccgcaacuugcuguacug

SEQ ID NO: 4334 - RNA, 20 nt, Homo sapiens
gagugguuccucgcgaccgg

SEQ ID NO: 4335 - RNA, 20 nt, Homo sapiens
cuugucaggaaacgcccuga

SEQ ID NO: 4336 - RNA, 20 nt, Homo sapiens
gaacuacaucuucgagaucg

SEQ ID NO: 4337 - RNA, 20 nt, Homo sapiens
ggagucguccagccgcauga

SEQ ID NO: 4338 - RNA, 20 nt, Homo sapiens
aacuacaucuucgagaucga

SEQ ID NO: 4339 - RNA, 20 nt, Homo sapiens
uggaggagaauucuucccag

SEQ ID NO: 4340 - RNA, 20 nt, Homo sapiens
uguacaacaccucgucgccg

SEQ ID NO: 4341 - RNA, 20 nt, Homo sapiens
ucguggacuucgggcucacg

SEQ ID NO: 4342 - RNA, 20 nt, Homo sapiens
ggagugguuccucgcgaccg

SEQ ID NO: 4343 - RNA, 20 nt, Homo sapiens
agcccgaaguccacgaugca

SEQ ID NO: 4344 - RNA, 20 nt, Homo sapiens
accugccagacggcuuccug

SEQ ID NO: 4345 - RNA, 20 nt, Homo sapiens
uguagugauguuccuagcau

SEQ ID NO: 4346 - RNA, 20 nt, Homo sapiens
ucagcggcuccacccaccug

SEQ ID NO: 4347 - RNA, 20 nt, Homo sapiens
cccccaggaccaggcugcgc

SEQ ID NO: 4348 - RNA, 20 nt, Homo sapiens
agggccuuuauacgccacca

SEQ ID NO: 4349 - RNA, 20 nt, Homo sapiens
uaucuaccgagcuuccgugg

SEQ ID NO: 4350 - RNA, 20 nt, Homo sapiens
ugggcgaaguagcucaucag

SEQ ID NO: 4351 - RNA, 20 nt, Homo sapiens
gggacuuuguagugacccgg

SEQ ID NO: 4352 - RNA, 20 nt, Homo sapiens
uucuggacugguguuauggg

SEQ ID NO: 4353 - RNA, 20 nt, Homo sapiens
guggugcuguaugggacagu

SEQ ID NO: 4354 - RNA, 20 nt, Homo sapiens
ccugcgccucaacuucagcg

SEQ ID NO: 4355 - RNA, 20 nt, Homo sapiens
gcucaucagggguacucucg

SEQ ID NO: 4356 - RNA, 20 nt, Homo sapiens
accaugcgcccaaacacucg

SEQ ID NO: 4357 - RNA, 20 nt, Homo sapiens
caugguggguaaaagccggg

SEQ ID NO: 4358 - RNA, 20 nt, Homo sapiens
ggguacucucgcggaucaca

SEQ ID NO: 4359 - RNA, 20 nt, Homo sapiens
uauacgccaccacggaagcu

SEQ ID NO: 4360 - RNA, 20 nt, Homo sapiens
cggguuaaagagcugagaca

SEQ ID NO: 4361 - RNA, 20 nt, Homo sapiens
cccacucagaagcuauacag

SEQ ID NO: 4362 - RNA, 20 nt, Homo sapiens
gggauacggccaauggcaga

SEQ ID NO: 4363 - RNA, 20 nt, Homo sapiens
agagacaccugaaccgccaa

SEQ ID NO: 4364 - RNA, 20 nt, Homo sapiens
ggcgggcacggugaacacga

SEQ ID NO: 4365 - RNA, 20 nt, Homo sapiens
ggcaugcaggaagugcaagg

SEQ ID NO: 4366 - RNA, 20 nt, Homo sapiens
gugggcgaaguagcucauca

SEQ ID NO: 4367 - RNA, 20 nt, Homo sapiens
agucccuuuaccaguugcag

SEQ ID NO: 4368 - RNA, 20 nt, Homo sapiens
gaugauguucuggaccagau

SEQ ID NO: 4369 - RNA, 20 nt, Homo sapiens
acgaguguuugggcgcaugg

SEQ ID NO: 4370 - RNA, 20 nt, Homo sapiens
ugggcaaguuggccuaugag

SEQ ID NO: 4371 - RNA, 20 nt, Homo sapiens
aaccgcagaucucaccauag

SEQ ID NO: 4372 - RNA, 20 nt, Homo sapiens
gaagcccccccaugaacaug

SEQ ID NO: 4373 - RNA, 20 nt, Homo sapiens
uggcaugguugauuugcaug

SEQ ID NO: 4374 - RNA, 20 nt, Homo sapiens
accaccuuggacacacacac

SEQ ID NO: 4375 - RNA, 20 nt, Homo sapiens
caggaucaguuaaaucgccg

SEQ ID NO: 4376 - RNA, 20 nt, Homo sapiens
guacgaagcugagcgcacgg

SEQ ID NO: 4377 - RNA, 20 nt, Homo sapiens
cugaaggaaaggugcuuccg

SEQ ID NO: 4378 - RNA, 20 nt, Homo sapiens
caagaccguccgaaaucccu

SEQ ID NO: 4379 - RNA, 20 nt, Homo sapiens
gguaccagugcuugacuagg

SEQ ID NO: 4380 - RNA, 20 nt, Homo sapiens
ucauccgccuagucaagcac

SEQ ID NO: 4381 - RNA, 20 nt, Homo sapiens
augagcuugacauagauuug

SEQ ID NO: 4382 - RNA, 20 nt, Homo sapiens
auuuaacugauccugaaaag

SEQ ID NO: 4383 - RNA, 20 nt, Homo sapiens
acacaggguaggagcuaccu

SEQ ID NO: 4384 - RNA, 20 nt, Homo sapiens
ucaguacgaagcugagcgca

SEQ ID NO: 4385 - RNA, 20 nt, Homo sapiens
cgaacaggucaguugacugg

SEQ ID NO: 4386 - RNA, 20 nt, Homo sapiens
uuugguaccagugcuugacu

SEQ ID NO: 4387 - RNA, 20 nt, Homo sapiens
ugagcuugacauagauuugg

SEQ ID NO: 4388 - RNA, 20 nt, Homo sapiens
aguacgaagcugagcgcacg

SEQ ID NO: 4389 - RNA, 20 nt, Homo sapiens
cggucuaugcuugggagcga

SEQ ID NO: 4390 - RNA, 20 nt, Homo sapiens
gaaaaguggugagaggacug

SEQ ID NO: 4391 - RNA, 20 nt, Homo sapiens
gagguccaggcuccacgcug

SEQ ID NO: 4392 - RNA, 20 nt, Homo sapiens
acacauuucaacacagccca

SEQ ID NO: 4393 - RNA, 20 nt, Homo sapiens
acugaguucgcuccagcucg

SEQ ID NO: 4394 - RNA, 20 nt, Homo sapiens
cccuguguguguguccaagg

SEQ ID NO: 4395 - RNA, 20 nt, Homo sapiens
ucaggaucaguuaaaucgcc

SEQ ID NO: 4396 - RNA, 20 nt, Homo sapiens
caaccaggucagcgucagau

SEQ ID NO: 4397 - RNA, 20 nt, Homo sapiens
auagaccgucaggagcucca

SEQ ID NO: 4398 - RNA, 20 nt, Homo sapiens
ugcaccagcuccaaucagcg

SEQ ID NO: 4399 - RNA, 20 nt, Homo sapiens
cuuacucagagcguugaagg

SEQ ID NO: 4400 - RNA, 20 nt, Homo sapiens
agggcauacggagacagcga

SEQ ID NO: 4401 - RNA, 20 nt, Homo sapiens
cgagcggcacaaaaucguca

SEQ ID NO: 4402 - RNA, 20 nt, Homo sapiens
ugagcucucgauagauccag

SEQ ID NO: 4403 - RNA, 20 nt, Homo sapiens
acaccucccaaaaaaacgag

SEQ ID NO: 4404 - RNA, 20 nt, Homo sapiens
ugaaggcgucagaaccguac

SEQ ID NO: 4405 - RNA, 20 nt, Homo sapiens
gagauaaaauaugcuggcaa

SEQ ID NO: 4406 - RNA, 20 nt, Homo sapiens
gacccaaccaauaaugugag

SEQ ID NO: 4407 - RNA, 20 nt, Homo sapiens
gaagcuguguaucuauugga

SEQ ID NO: 4408 - RNA, 20 nt, Homo sapiens
ugacauccucgauaaaacug

SEQ ID NO: 4409 - RNA, 20 nt, Homo sapiens
gcugcuuacgguguaugccu

SEQ ID NO: 4410 - RNA, 20 nt, Homo sapiens
gaagaggacaaggguaccau

SEQ ID NO: 4411 - RNA, 20 nt, Homo sapiens
uagggaggaucaaccgccaa

SEQ ID NO: 4412 - RNA, 20 nt, Homo sapiens
uuggcgguugauccucccua

SEQ ID NO: 4413 - RNA, 20 nt, Homo sapiens
guuauggaacacgacgagau

SEQ ID NO: 4414 - RNA, 20 nt, Homo sapiens
agaacauuccaagauggugc

SEQ ID NO: 4415 - RNA, 20 nt, Homo sapiens
cagguugggagaagucaacc

SEQ ID NO: 4416 - RNA, 20 nt, Homo sapiens
aguucugucuguucacgaag

SEQ ID NO: 4417 - RNA, 20 nt, Homo sapiens
ggcaggguggcuccuaugga

SEQ ID NO: 4418 - RNA, 20 nt, Homo sapiens
gcaccacucuucacgacccc

SEQ ID NO: 4419 - RNA, 20 nt, Homo sapiens
ugaaaaaagaagcucaaacc

SEQ ID NO: 4420 - RNA, 20 nt, Homo sapiens
gugacauccucgauaaaacu

SEQ ID NO: 4421 - RNA, 20 nt, Homo sapiens
ggacggaaaacagucuuaag

SEQ ID NO: 4422 - RNA, 20 nt, Homo sapiens
gauaagacaaaugccagucc

SEQ ID NO: 4423 - RNA, 20 nt, Homo sapiens
gaugggacaucguugcucag

SEQ ID NO: 4424 - RNA, 20 nt, Homo sapiens
acuccacaaugcaaucauug

SEQ ID NO: 4425 - RNA, 20 nt, Homo sapiens
aauccucaaugauugcauug

SEQ ID NO: 4426 - RNA, 20 nt, Homo sapiens
uggugaagacgagagcaucg

SEQ ID NO: 4427 - RNA, 20 nt, Homo sapiens
agagaaauuucgugaaacau

SEQ ID NO: 4428 - RNA, 20 nt, Homo sapiens
agcaucacaaagauguucug

SEQ ID NO: 4429 - RNA, 20 nt, Homo sapiens
gguucucaggagcaccagag

SEQ ID NO: 4430 - RNA, 20 nt, Homo sapiens
caggagcagguccaucacag

SEQ ID NO: 4431 - RNA, 20 nt, Homo sapiens
aaguucaagagcauagagag

SEQ ID NO: 4432 - RNA, 20 nt, Homo sapiens
agaaguucaagagcauagag

SEQ ID NO: 4433 - RNA, 20 nt, Homo sapiens
uccugcgccuggugaaacac

SEQ ID NO: 4434 - RNA, 20 nt, Homo sapiens
ggucuaugugagccugauca

SEQ ID NO: 4435 - RNA, 20 nt, Homo sapiens
agcauuuccaggggaagcgu

SEQ ID NO: 4436 - RNA, 20 nt, Homo sapiens
acguggcagaaggguacaga

SEQ ID NO: 4437 - RNA, 20 nt, Homo sapiens
gauggugaagacgagagcau

SEQ ID NO: 4438 - RNA, 20 nt, Homo sapiens
auuguggaguguguaguacu

SEQ ID NO: 4439 - RNA, 20 nt, Homo sapiens
gagaauuucauguuggacga

SEQ ID NO: 4440 - RNA, 20 nt, Homo sapiens
ggcugauauggaaaaccaug

SEQ ID NO: 4441 - RNA, 20 nt, Homo sapiens
gagaaccgugccauucccga

SEQ ID NO: 4442 - RNA, 20 nt, Homo sapiens
cguggcagaaggguacagau

SEQ ID NO: 4443 - RNA, 20 nt, Homo sapiens
gucuucaccauccagaccag

SEQ ID NO: 4444 - RNA, 20 nt, Homo sapiens
gcuagacgcugugcggaccg

SEQ ID NO: 4445 - RNA, 20 nt, Homo sapiens
acuucuaaccaucuaugccu

SEQ ID NO: 4446 - RNA, 20 nt, Homo sapiens
caggcucacauagaccucag

SEQ ID NO: 4447 - RNA, 20 nt, Homo sapiens
ucuuccuuccacucccggug

SEQ ID NO: 4448 - RNA, 20 nt, Homo sapiens
agucuaagcaaaucacgugg

SEQ ID NO: 4449 - RNA, 20 nt, Homo sapiens
uacuuacugcacuaguccca

SEQ ID NO: 4450 - RNA, 20 nt, Homo sapiens
augcuagacuuacccacaca

SEQ ID NO: 4451 - RNA, 20 nt, Homo sapiens
agacuuacccacacaaggca

SEQ ID NO: 4452 - RNA, 20 nt, Homo sapiens
aggugguugcuaagcgacag

SEQ ID NO: 4453 - RNA, 20 nt, Homo sapiens
aacagucuaagcaaaucacg

SEQ ID NO: 4454 - DNA, 20 bp, Homo sapiens
aggcgacgaccccagaaacg

SEQ ID NO: 4455 - RNA, 20 nt, Homo sapiens
accugaucgcaacaaauagu

SEQ ID NO: 4456 - RNA, 20 nt, Homo sapiens
caagaaaugaaugcaacugg

SEQ ID NO: 4457 - RNA, 20 nt, Homo sapiens
agcacaccccaccucugaca

SEQ ID NO: 4458 - RNA, 20 nt, Homo sapiens
gugugacaagacucaaugau

SEQ ID NO: 4459 - RNA, 20 nt, Homo sapiens
uuuguucacgacccucaacu

SEQ ID NO: 4460 - RNA, 20 nt, Homo sapiens
gugauggagcucuuuaauca

SEQ ID NO: 4461 - RNA, 20 nt, Homo sapiens
uagacuuacccacacaaggc

SEQ ID NO: 4462 - DNA, 20 bp, Homo sapiens
cgacgaccccagaaacgcgg

SEQ ID NO: 4463 - RNA, 20 nt, Homo sapiens
uuaauuccaaaccggaugag

SEQ ID NO: 4464 - RNA, 20 nt, Homo sapiens
agugcagccgggaaaacuca

SEQ ID NO: 4465 - RNA, 20 nt, Homo sapiens
ggcaacgcucaccuugaccc

SEQ ID NO: 4466 - RNA, 20 nt, Homo sapiens
uucacauugugcagagaccg

SEQ ID NO: 4467 - RNA, 20 nt, Homo sapiens
ggugguugcuaagcgacagg

SEQ ID NO: 4468 - RNA, 20 nt, Homo sapiens
gagugcagccgggaaaacuc

SEQ ID NO: 4469 - RNA, 20 nt, Homo sapiens
ucccaaacagaauugugacc

SEQ ID NO: 4470 - RNA, 20 nt, Homo sapiens
gaggugguugcuaagcgaca

SEQ ID NO: 4471 - RNA, 20 nt, Homo sapiens
ggcagggaguagccaaguug

SEQ ID NO: 4472 - RNA, 20 nt, Homo sapiens
uccucccaggagacucugug

SEQ ID NO: 4473 - RNA, 20 nt, Homo sapiens
cgugucacacaacugcccaa

SEQ ID NO: 4474 - DNA, 20 bp, Homo sapiens
gcccacgacaccaaccacca

SEQ ID NO: 4475 - RNA, 20 nt, Homo sapiens
cccuucggucaccacgagca

SEQ ID NO: 4476 - RNA, 20 nt, Homo sapiens
agccggccaguuccaaaccc

SEQ ID NO: 4477 - RNA, 20 nt, Homo sapiens
caccuaccuaagaaccaucc

SEQ ID NO: 4478 - RNA, 20 nt, Homo sapiens
gcgugacuuccacaugagcg

SEQ ID NO: 4479 - RNA, 20 nt, Homo sapiens
agggcccggcgcaaugacag

SEQ ID NO: 4480 - RNA, 20 nt, Homo sapiens
caguuccaaacccugguggu

SEQ ID NO: 4481 - DNA, 20 bp, Homo sapiens
cgcccacgacaccaaccacc

SEQ ID NO: 4482 - RNA, 20 nt, Homo sapiens
gucugggcggugcuacaacu

SEQ ID NO: 4483 - RNA, 20 nt, Homo sapiens
ccagggagauggccccacag

SEQ ID NO: 4484 - RNA, 20 nt, Homo sapiens
gggcccugaccacgcucaug

SEQ ID NO: 4485 - RNA, 20 nt, Homo sapiens
gacagcggcaccuaccucug

SEQ ID NO: 4486 - RNA, 20 nt, Homo sapiens
ggccaggaugguucuuaggu

SEQ ID NO: 4487 - RNA, 20 nt, Homo sapiens
cccugcucguggugaccgaa

SEQ ID NO: 4488 - RNA, 20 nt, Homo sapiens
cauguggaagucacgcccgu

SEQ ID NO: 4489 - RNA, 20 nt, Homo sapiens
cuuccacaugagcgugguca

SEQ ID NO: 4490 - RNA, 20 nt, Homo sapiens
cugcagcuucuccaacacau

SEQ ID NO: 4491 - RNA, 20 nt, Homo sapiens
gugucacacaacugcccaac

SEQ ID NO: 4492 - RNA, 20 nt, Homo sapiens
uuugugcccuuccagagaga

SEQ ID NO: 4493 - RNA, 20 nt, Homo sapiens
uggcggccaggaugguucuu

SEQ ID NO: 4494 - RNA, 20 nt, Homo sapiens
cggccaguuccaaacccugg

SEQ ID NO: 4495 - DNA, 20 bp, Homo sapiens
cagcaaccagacggacaagc

SEQ ID NO: 4496 - RNA, 20 nt, Homo sapiens
cagccuggugcugcuagucu

SEQ ID NO: 4497 - RNA, 20 nt, Homo sapiens
gcucucuuugaucugcgccu

SEQ ID NO: 4498 - RNA, 20 nt, Homo sapiens
guggagaguggacucaaacg

SEQ ID NO: 4499 - RNA, 20 nt, Homo sapiens
gcugucacagcacacgaagu

SEQ ID NO: 4500 - RNA, 20 nt, Homo sapiens
gcagccuaaagcgugcaaag

SEQ ID NO: 4501 - RNA, 20 nt, Homo sapiens
ggcauagacaaguuaccacu

SEQ ID NO: 4502 - RNA, 20 nt, Homo sapiens
cacuuaaaacccagcgacgg

SEQ ID NO: 4503 - RNA, 20 nt, Homo sapiens
uugcuguaugacucucccag

SEQ ID NO: 4504 - RNA, 20 nt, Homo sapiens
cugcacuuaaaacccagcga

SEQ ID NO: 4505 - RNA, 20 nt, Homo sapiens
aguuugcucacuaacuggaa

SEQ ID NO: 4506 - RNA, 20 nt, Homo sapiens
aguauugcacuaacuaucca

SEQ ID NO: 4507 - RNA, 20 nt, Homo sapiens
aagcacgcaugaacuccaag

SEQ ID NO: 4508 - RNA, 20 nt, Homo sapiens
gccaagauuccagcuaaggu

SEQ ID NO: 4509 - RNA, 20 nt, Homo sapiens
gaacaacucuauccacauag

SEQ ID NO: 4510 - RNA, 20 nt, Homo sapiens
gggcaacagaacgcggauga

SEQ ID NO: 4511 - RNA, 20 nt, Homo sapiens
caaaacuuuaugugaccgug

SEQ ID NO: 4512 - RNA, 20 nt, Homo sapiens
cagauaaccaugaucgggag

SEQ ID NO: 4513 - RNA, 20 nt, Homo sapiens
uucaagagauaggaccccag

SEQ ID NO: 4514 - RNA, 20 nt, Homo sapiens
ccagcaagacaaacgccucu

SEQ ID NO: 4515 - RNA, 20 nt, Homo sapiens
cuuugugaaggcuaacucug

SEQ ID NO: 4516 - RNA, 20 nt, Homo sapiens
agaugaaaucuggaaugacc

SEQ ID NO: 4517 - RNA, 20 nt, Homo sapiens
uacaaagcucacauccuggu

SEQ ID NO: 4518 - DNA, 20 bp, Homo sapiens
agagggacaaccccgccacg

SEQ ID NO: 4519 - RNA, 20 nt, Homo sapiens
aggcauagacaaguuaccac

SEQ ID NO: 4520 - RNA, 20 nt, Homo sapiens
augaucagcgugcuucgagc

SEQ ID NO: 4521 - RNA, 20 nt, Homo sapiens
aggaacuagugacagaacua

SEQ ID NO: 4522 - RNA, 20 nt, Homo sapiens
cccugcucuucacgggcgug

SEQ ID NO: 4523 - RNA, 20 nt, Homo sapiens
ccuugaccgagugaaacuca

SEQ ID NO: 4524 - RNA, 20 nt, Homo sapiens
gcuccacacuaaauccgcag

SEQ ID NO: 4525 - RNA, 20 nt, Homo sapiens
ugaaguccgugaguuucacu

SEQ ID NO: 4526 - RNA, 20 nt, Homo sapiens
acucggucaagguuguugga

SEQ ID NO: 4527 - RNA, 20 nt, Homo sapiens
cugaugaagaugccggccag

SEQ ID NO: 4528 - RNA, 20 nt, Homo sapiens
gggacugggaucgaacaaca

SEQ ID NO: 4529 - RNA, 20 nt, Homo sapiens
agguggggcuuccguaagug

SEQ ID NO: 4530 - RNA, 20 nt, Homo sapiens
ucgggucccuuauccgcacc

SEQ ID NO: 4531 - RNA, 20 nt, Homo sapiens
gaacggggguuugucaagca

SEQ ID NO: 4532 - RNA, 20 nt, Homo sapiens
acugcggauuuaguguggag

SEQ ID NO: 4533 - RNA, 20 nt, Homo sapiens
aggaaggaaacauggaacuc

SEQ ID NO: 4534 - RNA, 20 nt, Homo sapiens
uccccuuucccaacaccaug

SEQ ID NO: 4535 - RNA, 20 nt, Homo sapiens
cuuccauaccauccacuggc

SEQ ID NO: 4536 - RNA, 20 nt, Homo sapiens
cauggaauaugucaacggug

SEQ ID NO: 4537 - RNA, 20 nt, Homo sapiens
ggaacucaggcagaaauucg

SEQ ID NO: 4538 - RNA, 20 nt, Homo sapiens
guaaaggacucauuccacug

SEQ ID NO: 4539 - RNA, 20 nt, Homo sapiens
auuccacugcggauuuagug

SEQ ID NO: 4540 - RNA, 20 nt, Homo sapiens
ggaucggcuguacuucguca

SEQ ID NO: 4541 - RNA, 20 nt, Homo sapiens
uacaacguacccauuccgga

SEQ ID NO: 4542 - RNA, 20 nt, Homo sapiens
gucauggaauaugucaacgg

SEQ ID NO: 4543 - RNA, 20 nt, Homo sapiens
acaacguacccauuccggaa

SEQ ID NO: 4544 - RNA, 20 nt, Homo sapiens
cagugugauccauuccgcag

SEQ ID NO: 4545 - RNA, 20 nt, Homo sapiens
aaagcccguuuggauccaua

SEQ ID NO: 4546 - RNA, 20 nt, Homo sapiens
uggaccacaaaacagcaaac

SEQ ID NO: 4547 - RNA, 20 nt, Homo sapiens
auguaccacauucagcaagu

SEQ ID NO: 4548 - RNA, 20 nt, Homo sapiens
cauggugaacuacuacaccu

SEQ ID NO: 4549 - RNA, 20 nt, Homo sapiens
cguggacguucggaacggaa

SEQ ID NO: 4550 - RNA, 20 nt, Homo sapiens
agggggaagucaucucccug

SEQ ID NO: 4551 - RNA, 20 nt, Homo sapiens
cgagguguaguaguucacca

SEQ ID NO: 4552 - RNA, 20 nt, Homo sapiens
ucggugaccccugugcugcg

SEQ ID NO: 4553 - RNA, 20 nt, Homo sapiens
gcuccccaucgacgucacgg

SEQ ID NO: 4554 - RNA, 20 nt, Homo sapiens
ggcgccguggacguucggaa

SEQ ID NO: 4555 - RNA, 20 nt, Homo sapiens
cuucaucgagaugaacacgg

SEQ ID NO: 4556 - RNA, 20 nt, Homo sapiens
uccccaucgacgucacggag

SEQ ID NO: 4557 - RNA, 20 nt, Homo sapiens
cccccuccgugacgucgaug

SEQ ID NO: 4558 - RNA, 20 nt, Homo sapiens
gaagcuccccaucgacguca

SEQ ID NO: 4559 - RNA, 20 nt, Homo sapiens
uagaggggacgccugcacuu

SEQ ID NO: 4560 - RNA, 20 nt, Homo sapiens
ggccuucaucgagaugaaca

SEQ ID NO: 4561 - RNA, 20 nt, Homo sapiens
cuccccaucgacgucacgga

SEQ ID NO: 4562 - RNA, 20 nt, Homo sapiens
cuuuccguuccgaacgucca

SEQ ID NO: 4563 - RNA, 20 nt, Homo sapiens
gagguuggugaccuucccaa

SEQ ID NO: 4564 - RNA, 20 nt, Homo sapiens
ccggauguggaucacucuag

SEQ ID NO: 4565 - RNA, 20 nt, Homo sapiens
ccacgaugauccugagcacg

SEQ ID NO: 4566 - RNA, 20 nt, Homo sapiens
gcuggaccagaccauggccg

SEQ ID NO: 4567 - RNA, 20 nt, Homo sapiens
gggguccgcauacugcagca

SEQ ID NO: 4568 - RNA, 20 nt, Homo sapiens
ccccgugcucaggaucaucg

SEQ ID NO: 4569 - RNA, 20 nt, Homo sapiens
cgacagcucucccaaccagg

SEQ ID NO: 4570 - RNA, 20 nt, Homo sapiens
gcaggucggaucgccauccc

SEQ ID NO: 4571 - RNA, 20 nt, Homo sapiens
guuguacuugacguugaggc

SEQ ID NO: 4572 - RNA, 20 nt, Homo sapiens
aaugacagcaagaaguucaa

SEQ ID NO: 4573 - RNA, 20 nt, Homo sapiens
ccgggcugcgcuuaucgcga

SEQ ID NO: 4574 - RNA, 20 nt, Homo sapiens
gcacuuuauagaccagcacc

SEQ ID NO: 4575 - RNA, 20 nt, Homo sapiens
cccucgcgauaagcgcagcc

SEQ ID NO: 4576 - RNA, 20 nt, Homo sapiens
accgggcugcgcuuaucgcg

SEQ ID NO: 4577 - RNA, 20 nt, Homo sapiens
ugcacuuuauagaccagcac

SEQ ID NO: 4578 - RNA, 20 nt, Homo sapiens
ggugcuggucuauaaagugc

SEQ ID NO: 4579 - RNA, 20 nt, Homo sapiens
gcuggagaaccugaccgccg

SEQ ID NO: 4580 - RNA, 20 nt, Homo sapiens
gucuauaaagugcaggccug

SEQ ID NO: 4581 - RNA, 20 nt, Homo sapiens
agcuucuaccuggagaccua

SEQ ID NO: 4582 - RNA, 20 nt, Homo sapiens
auggacagcagcgcgccccg

SEQ ID NO: 4583 - RNA, 20 nt, Homo sapiens
gcuaacgugcugcgcgacau

SEQ ID NO: 4584 - RNA, 20 nt, Homo sapiens
caugucgcgcagcacguuag

SEQ ID NO: 4585 - RNA, 20 nt, Homo sapiens
gauccaggccccuccucagu

SEQ ID NO: 4586 - RNA, 20 nt, Homo sapiens
cgauaagcgcagcccggugc

SEQ ID NO: 4587 - RNA, 20 nt, Homo sapiens
cgcccguagcccucgcgcag

SEQ ID NO: 4588 - RNA, 20 nt, Homo sapiens
gaacuucuugagcuccucgg

SEQ ID NO: 4589 - RNA, 20 nt, Homo sapiens
guucaagcugaagcugcugu

SEQ ID NO: 4590 - RNA, 20 nt, Homo sapiens
gucggcagccaagccaggug

SEQ ID NO: 4591 - RNA, 20 nt, Homo sapiens
agcugaccagcuugucggug

SEQ ID NO: 4592 - RNA, 20 nt, Homo sapiens
agcggugagcucggcgccgu

SEQ ID NO: 4593 - RNA, 20 nt, Homo sapiens
cagcacguuagcggugagcu

SEQ ID NO: 4594 - RNA, 20 nt, Homo sapiens
ggcuacgggcgcaucccgcg

SEQ ID NO: 4595 - RNA, 20 nt, Homo sapiens
cgcuaacgugcugcgcgaca

SEQ ID NO: 4596 - RNA, 20 nt, Homo sapiens
ggccuggaucccagcuggcg

SEQ ID NO: 4597 - RNA, 20 nt, Homo sapiens
gauggccgggcagcugcagg

SEQ ID NO: 4598 - RNA, 20 nt, Homo sapiens
agaagacccaauaaucgcga

SEQ ID NO: 4599 - RNA, 20 nt, Homo sapiens
caaacguaauagucuccuag

SEQ ID NO: 4600 - RNA, 20 nt, Homo sapiens
ccaaacguuugagguuccaa

SEQ ID NO: 4601 - RNA, 20 nt, Homo sapiens
acuggcaguugcgugacggu

SEQ ID NO: 4602 - RNA, 20 nt, Homo sapiens
accagcuucagauacagaag

SEQ ID NO: 4603 - RNA, 20 nt, Homo sapiens
ucagcaaggucucccagugu

SEQ ID NO: 4604 - RNA, 20 nt, Homo sapiens
cgguugcuuggggugcaugc

SEQ ID NO: 4605 - RNA, 20 nt, Homo sapiens
cucuuccugaagcuuaccug

SEQ ID NO: 4606 - RNA, 20 nt, Homo sapiens
aagaggcuucauucaccucu

SEQ ID NO: 4607 - RNA, 20 nt, Homo sapiens
ucagauugcugacuugaugg

SEQ ID NO: 4608 - RNA, 20 nt, Homo sapiens
guugcgugacgguuggccaa

SEQ ID NO: 4609 - RNA, 20 nt, Homo sapiens
ugcgcagagccuaaaaccau

SEQ ID NO: 4610 - RNA, 20 nt, Homo sapiens
uugcccaaaccggcaucacc

SEQ ID NO: 4611 - RNA, 20 nt, Homo sapiens
auugaauccauuccagucaa

SEQ ID NO: 4612 - RNA, 20 nt, Homo sapiens
ggaaccucaaacguuugguc

SEQ ID NO: 4613 - RNA, 20 nt, Homo sapiens
gccagcacguccacagccau

SEQ ID NO: 4614 - RNA, 20 nt, Homo sapiens
cucuaggagacuauuacguu

SEQ ID NO: 4615 - RNA, 20 nt, Homo sapiens
ucgcgauuauugggucuucu

SEQ ID NO: 4616 - RNA, 20 nt, Homo sapiens
acccaacacuuccucaacug

SEQ ID NO: 4617 - RNA, 20 nt, Homo sapiens
agaggagacucuuggaccuc

SEQ ID NO: 4618 - RNA, 20 nt, Homo sapiens
agauguccaaagagcagacu

SEQ ID NO: 4619 - RNA, 20 nt, Homo sapiens
gauuauuccuuugacuggaa

SEQ ID NO: 4620 - RNA, 20 nt, Homo sapiens
uugugaagaauauugaucuu

SEQ ID NO: 4621 - RNA, 20 nt, Homo sapiens
gacacaguucuuucauguga

SEQ ID NO: 4622 - RNA, 20 nt, Homo sapiens
guuccagucucuucuucaga

SEQ ID NO: 4623 - RNA, 20 nt, Homo sapiens
ucaggcugagaaaaacaaca

SEQ ID NO: 4624 - RNA, 20 nt, Homo sapiens
ggaacaaguucagugaacug

SEQ ID NO: 4625 - RNA, 20 nt, Homo sapiens
cuagggcauccaaaaagcca

SEQ ID NO: 4626 - RNA, 20 nt, Homo sapiens
ggauccaacuuacacuucug

SEQ ID NO: 4627 - RNA, 20 nt, Homo sapiens
augccuguaacucuauaccu

SEQ ID NO: 4628 - RNA, 20 nt, Homo sapiens
acaauaauaugugcuccuac

SEQ ID NO: 4629 - RNA, 20 nt, Homo sapiens
gguguuguuuacuaguguug

SEQ ID NO: 4630 - RNA, 20 nt, Homo sapiens
ggcauccccaacaccaaccg

SEQ ID NO: 4631 - RNA, 20 nt, Homo sapiens
aaacaacaagggcccaaugg

SEQ ID NO: 4632 - RNA, 20 nt, Homo sapiens
gaucagaaaugauaucgguu

SEQ ID NO: 4633 - RNA, 20 nt, Homo sapiens
aagagaaucugcaaagaccu

SEQ ID NO: 4634 - RNA, 20 nt, Homo sapiens
uuggaugcccuagaccaugc

SEQ ID NO: 4635 - RNA, 20 nt, Homo sapiens
caucuuaaaaaauucccaca

SEQ ID NO: 4636 - RNA, 20 nt, Homo sapiens
ugcaugcucacugauaauga

SEQ ID NO: 4637 - RNA, 20 nt, Homo sapiens
gaacacagaaauaugaacaa

SEQ ID NO: 4638 - RNA, 20 nt, Homo sapiens
aaugccuguaacucuauacc

SEQ ID NO: 4639 - RNA, 20 nt, Homo sapiens
gaacuaaccugcauggucua

SEQ ID NO: 4640 - DNA, 20 bp, Homo sapiens
gaaaaacaacaagggcccaa

SEQ ID NO: 4641 - RNA, 20 nt, Homo sapiens
aaaguaaagauggauaguga

SEQ ID NO: 4642 - RNA, 20 nt, Homo sapiens
caggcugagaaaaacaacaa

SEQ ID NO: 4643 - RNA, 20 nt, Homo sapiens
cagcuugcagauauaaucca

SEQ ID NO: 4644 - RNA, 20 nt, Homo sapiens
aacagucaaacacaaucugg

SEQ ID NO: 4645 - RNA, 20 nt, Homo sapiens
acaucauagcucagcugaug

SEQ ID NO: 4646 - RNA, 20 nt, Homo sapiens
auugggcugacugccucggu

SEQ ID NO: 4647 - RNA, 20 nt, Homo sapiens
ggaacuagaaaguguuucca

SEQ ID NO: 4648 - RNA, 20 nt, Homo sapiens
uacacacaguagauaacacg

SEQ ID NO: 4649 - RNA, 20 nt, Homo sapiens
gguccguacacuaacagaug

SEQ ID NO: 4650 - RNA, 20 nt, Homo sapiens
gcaggcuucacacauaagca

SEQ ID NO: 4651 - RNA, 20 nt, Homo sapiens
aagcaccuacuacgaauagg

SEQ ID NO: 4652 - RNA, 20 nt, Homo sapiens
agcaccuacuacgaauaggu

SEQ ID NO: 4653 - RNA, 20 nt, Homo sapiens
ugaucccaccuauucguagu

SEQ ID NO: 4654 - RNA, 20 nt, Homo sapiens
gccaagcaccuacuacgaau

SEQ ID NO: 4655 - RNA, 20 nt, Homo sapiens
gggacggcuggacuaucaca

SEQ ID NO: 4656 - RNA, 20 nt, Homo sapiens
accaccuugaaguuaauccu

SEQ ID NO: 4657 - RNA, 20 nt, Homo sapiens
uuuccucaucuguuagugua

SEQ ID NO: 4658 - RNA, 20 nt, Homo sapiens
uauucguaguaggugcuugg

SEQ ID NO: 4659 - RNA, 20 nt, Homo sapiens
ucaggagauguugaaaacag

SEQ ID NO: 4660 - RNA, 20 nt, Homo sapiens
ugcaggcuucacacauaagc

SEQ ID NO: 4661 - RNA, 20 nt, Homo sapiens
gcucccagcauugaagaugu

SEQ ID NO: 4662 - RNA, 20 nt, Homo sapiens
ucuacuguguguaagaagga

SEQ ID NO: 4663 - RNA, 20 nt, Homo sapiens
gcaugccuugcgaagaacca

SEQ ID NO: 4664 - RNA, 20 nt, Homo sapiens
ucugaaucuuccuucacaac

SEQ ID NO: 4665 - RNA, 20 nt, Homo sapiens
agucuaugagccaguuguga

SEQ ID NO: 4666 - RNA, 20 nt, Homo sapiens
aacuugaaacaaacucucaa

SEQ ID NO: 4667 - RNA, 20 nt, Homo sapiens
gcagcacaagaucaaucugc

SEQ ID NO: 4668 - RNA, 20 nt, Homo sapiens
ugaccuacaucuucaaugcu

SEQ ID NO: 4669 - RNA, 20 nt, Homo sapiens
acuugaaacaaacucucaaa

SEQ ID NO: 4670 - RNA, 20 nt, Homo sapiens
aagugaaaugcuuacuguga

SEQ ID NO: 4671 - RNA, 20 nt, Homo sapiens
ggacuaucacaaggagcagg

SEQ ID NO: 4672 - RNA, 20 nt, Homo sapiens
accuauucguaguaggugcu

SEQ ID NO: 4673 - RNA, 20 nt, Homo sapiens
gucgucuagaagugaaugag

SEQ ID NO: 4674 - RNA, 20 nt, Homo sapiens
uacuuacacauccuuggacu

SEQ ID NO: 4675 - RNA, 20 nt, Homo sapiens
gaugugggaucauagaucuc

SEQ ID NO: 4676 - RNA, 20 nt, Homo sapiens
ccaaaguuagacaaaaugcc

SEQ ID NO: 4677 - RNA, 20 nt, Homo sapiens
ggagaauauugaguucuggc

SEQ ID NO: 4678 - RNA, 20 nt, Homo sapiens
acgacaaaaugcaaaaaagg

SEQ ID NO: 4679 - RNA, 20 nt, Homo sapiens
ucauuccagauuccagaugu

SEQ ID NO: 4680 - RNA, 20 nt, Homo sapiens
uuaguguacuuacacauccu

SEQ ID NO: 4681 - RNA, 20 nt, Homo sapiens
cugcugcugaaguaaugcaa

SEQ ID NO: 4682 - RNA, 20 nt, Homo sapiens
aaugaaaucuuccaagucca

SEQ ID NO: 4683 - RNA, 20 nt, Homo sapiens
gcuaacccaaaggaauugaa

SEQ ID NO: 4684 - RNA, 20 nt, Homo sapiens
guucuucucugcuaacccaa

SEQ ID NO: 4685 - RNA, 20 nt, Homo sapiens
uagacgacaaaaugcaaaaa

SEQ ID NO: 4686 - RNA, 20 nt, Homo sapiens
ccuaaagucugaauucagug

SEQ ID NO: 4687 - RNA, 20 nt, Homo sapiens
aaugcaauggucucaaucuc

SEQ ID NO: 4688 - RNA, 20 nt, Homo sapiens
gagaucuaugaucccacauc

SEQ ID NO: 4689 - RNA, 20 nt, Homo sapiens
auaguuauacuuacuuuggu

SEQ ID NO: 4690 - RNA, 20 nt, Homo sapiens
augaucccacaucuggaauc

SEQ ID NO: 4691 - RNA, 20 nt, Homo sapiens
uuagcagagaagaacauucc

SEQ ID NO: 4692 - RNA, 20 nt, Homo sapiens
uauaucucuucugcuuuaca

SEQ ID NO: 4693 - RNA, 20 nt, Homo sapiens
gugaggagaauauugaguuc

SEQ ID NO: 4694 - RNA, 20 nt, Homo sapiens
uucauuccagauuccagaug

SEQ ID NO: 4695 - RNA, 20 nt, Homo sapiens
ccucacugaauucagacuuu

SEQ ID NO: 4696 - RNA, 20 nt, Homo sapiens
gugguuccuuucaauuccuu

SEQ ID NO: 4697 - RNA, 20 nt, Homo sapiens
gaacaaacuuacaaagucuu

SEQ ID NO: 4698 - RNA, 20 nt, Homo sapiens
gguguaaagaguugcgagug

SEQ ID NO: 4699 - RNA, 20 nt, Homo sapiens
cuucgauacaucaaacagcu

SEQ ID NO: 4700 - RNA, 20 nt, Homo sapiens
ggaugucuaguucacgcacu

SEQ ID NO: 4701 - RNA, 20 nt, Homo sapiens
uuaccuucauuguaucaacg

SEQ ID NO: 4702 - RNA, 20 nt, Homo sapiens
cgauacaucaaacagcuggg

SEQ ID NO: 4703 - RNA, 20 nt, Homo sapiens
guaauuaaugauccuaucca

SEQ ID NO: 4704 - RNA, 20 nt, Homo sapiens
aaacgagacucaucaagaca

SEQ ID NO: 4705 - RNA, 20 nt, Homo sapiens
uccaucccgacuacaagaca

SEQ ID NO: 4706 - RNA, 20 nt, Homo sapiens
aggaugucuaguucacgcac

SEQ ID NO: 4707 - RNA, 20 nt, Homo sapiens
guguaucaaugauucggacg

SEQ ID NO: 4708 - RNA, 20 nt, Homo sapiens
ccaucccgacuacaagacau

SEQ ID NO: 4709 - RNA, 20 nt, Homo sapiens
auugucuacuucacagacac

SEQ ID NO: 4710 - RNA, 20 nt, Homo sapiens
caucccgacuacaagacaug

SEQ ID NO: 4711 - RNA, 20 nt, Homo sapiens
aucgauuugagcauagucua

SEQ ID NO: 4712 - RNA, 20 nt, Homo sapiens
ucuucgacaggugauucaag

SEQ ID NO: 4713 - RNA, 20 nt, Homo sapiens
uaauggaauuaagccuguca

SEQ ID NO: 4714 - RNA, 20 nt, Homo sapiens
agagcuuaucaacacaaagu

SEQ ID NO: 4715 - RNA, 20 nt, Homo sapiens
ugcagggugggguaucuagc

SEQ ID NO: 4716 - RNA, 20 nt, Homo sapiens
cuucaaagccaccgcgccug

SEQ ID NO: 4717 - RNA, 20 nt, Homo sapiens
cccaugucuuguagucggga

SEQ ID NO: 4718 - RNA, 20 nt, Homo sapiens
gcuuaguuauauccagcgau

SEQ ID NO: 4719 - RNA, 20 nt, Homo sapiens
ucuucgauacaucaaacagc

SEQ ID NO: 4720 - RNA, 20 nt, Homo sapiens
uucaccuccgggcgagcaag

SEQ ID NO: 4721 - RNA, 20 nt, Homo sapiens
gaugacuacauagagauuac

SEQ ID NO: 4722 - RNA, 20 nt, Homo sapiens
uaaaagaaauggcauugaug

SEQ ID NO: 4723 - RNA, 20 nt, Homo sapiens
cauugguaagaagaucggug

SEQ ID NO: 4724 - RNA, 20 nt, Homo sapiens
ucugcagguguguuaccgag

SEQ ID NO: 4725 - RNA, 20 nt, Homo sapiens
augccagucgaucugagcau

SEQ ID NO: 4726 - RNA, 20 nt, Homo sapiens
gacuuccaacccaaugagca

SEQ ID NO: 4727 - RNA, 20 nt, Homo sapiens
caacuacuucacgaagcuag

SEQ ID NO: 4728 - RNA, 20 nt, Homo sapiens
ccugauccaaaacuucucgg

SEQ ID NO: 4729 - RNA, 20 nt, Homo sapiens
aggcaugguaagggucauug

SEQ ID NO: 4730 - RNA, 20 nt, Homo sapiens
gcuaguggaacaguacacca

SEQ ID NO: 4731 - RNA, 20 nt, Homo sapiens
ugaacucgcugaccuugugg

SEQ ID NO: 4732 - RNA, 20 nt, Homo sapiens
augcaggaacacaugcgcau

SEQ ID NO: 4733 - RNA, 20 nt, Homo sapiens
ugagaagcagagcgaugaug

SEQ ID NO: 4734 - RNA, 20 nt, Homo sapiens
ugagguguacgcaccaggug

SEQ ID NO: 4735 - RNA, 20 nt, Homo sapiens
uccaacccaaugagcaaggu

SEQ ID NO: 4736 - RNA, 20 nt, Homo sapiens
gagcggcguacugacaucuu

SEQ ID NO: 4737 - RNA, 20 nt, Homo sapiens
cccuccccccaccacgccag

SEQ ID NO: 4738 - RNA, 20 nt, Homo sapiens
caagauacucaucuggagca

SEQ ID NO: 4739 - RNA, 20 nt, Homo sapiens
cgcaaggauuaugaucccaa

SEQ ID NO: 4740 - RNA, 20 nt, Homo sapiens
accuaccuugcucauugggu

SEQ ID NO: 4741 - RNA, 20 nt, Homo sapiens
agguguguuaccgaguggaa

SEQ ID NO: 4742 - RNA, 20 nt, Homo sapiens
ccaugccuacuaccgccaca

SEQ ID NO: 4743 - RNA, 20 nt, Homo sapiens
aauccuugcggacaaugacu

SEQ ID NO: 4744 - RNA, 20 nt, Homo sapiens
cuucaccacauccaagucga

SEQ ID NO: 4745 - RNA, 20 nt, Homo sapiens
gcuucgugaaguaguugaag

SEQ ID NO: 4746 - RNA, 20 nt, Homo sapiens
gauuauuuacccuccuccag

SEQ ID NO: 4747 - RNA, 20 nt, Homo sapiens
ggaugacaaacaggagaagg

SEQ ID NO: 4748 - RNA, 20 nt, Homo sapiens
uaaucuucaucaaucaauag

SEQ ID NO: 4749 - RNA, 20 nt, Homo sapiens
auagcgguucaaugaccacg

SEQ ID NO: 4750 - RNA, 20 nt, Homo sapiens
uccuggcaagcgagacacac

SEQ ID NO: 4751 - RNA, 20 nt, Homo sapiens
caguaaaagaaaaucacggu

SEQ ID NO: 4752 - RNA, 20 nt, Homo sapiens
ccugguguaucaccucgucc

SEQ ID NO: 4753 - RNA, 20 nt, Homo sapiens
ggagaacuaaaagucgucaa

SEQ ID NO: 4754 - RNA, 20 nt, Homo sapiens
aaaaggaucaagacgcucug

SEQ ID NO: 4755 - RNA, 20 nt, Homo sapiens
gagacuccucgaacagaucg

SEQ ID NO: 4756 - RNA, 20 nt, Homo sapiens
cagugcucguaaaaacagau

SEQ ID NO: 4757 - RNA, 20 nt, Homo sapiens
ccaguaaaagaaaaucacgg

SEQ ID NO: 4758 - RNA, 20 nt, Homo sapiens
aucauuaagcaaugccacag

SEQ ID NO: 4759 - RNA, 20 nt, Homo sapiens
ugagacaccaggucgugcaa

SEQ ID NO: 4760 - RNA, 20 nt, Homo sapiens
acuccucgaacagaucgagg

SEQ ID NO: 4761 - RNA, 20 nt, Homo sapiens
aaggguauccgccaacacag

SEQ ID NO: 4762 - RNA, 20 nt, Homo sapiens
uuucgagcuggaguucgaau

SEQ ID NO: 4763 - RNA, 20 nt, Homo sapiens
gagacaccaggucgugcaaa

SEQ ID NO: 4764 - RNA, 20 nt, Homo sapiens
aaugaaugcuaggacuuaca

SEQ ID NO: 4765 - RNA, 20 nt, Homo sapiens
gcauacuccuuccuuaagau

SEQ ID NO: 4766 - RNA, 20 nt, Homo sapiens
aaucugacgcaaugcagccu

SEQ ID NO: 4767 - RNA, 20 nt, Homo sapiens
gucauaccacccaaaggugu

SEQ ID NO: 4768 - RNA, 20 nt, Homo sapiens
acaccagcuagucagauggg

SEQ ID NO: 4769 - RNA, 20 nt, Homo sapiens
cgaauaggaacauaaccagc

SEQ ID NO: 4770 - RNA, 20 nt, Homo sapiens
uuaguuaguugauacuacug

SEQ ID NO: 4771 - RNA, 20 nt, Homo sapiens
gagccaguaaaagaaaauca

SEQ ID NO: 4772 - RNA, 20 nt, Homo sapiens
uaucauuaagcaaugccaca

SEQ ID NO: 4773 - RNA, 20 nt, Homo sapiens
cagauacaaagacagugcgg

SEQ ID NO: 4774 - RNA, 20 nt, Homo sapiens
cacugguaggacgaugccgg

SEQ ID NO: 4775 - RNA, 20 nt, Homo sapiens
ccucacugguaggacgaugc

SEQ ID NO: 4776 - RNA, 20 nt, Homo sapiens
cagaaagcgccgcccuuggu

SEQ ID NO: 4777 - RNA, 20 nt, Homo sapiens
cacugccagaagaucaccgc

SEQ ID NO: 4778 - RNA, 20 nt, Homo sapiens
gaagcacuuccuaaacauca

SEQ ID NO: 4779 - RNA, 20 nt, Homo sapiens
gggcaugaacauguugacaa

SEQ ID NO: 4780 - RNA, 20 nt, Homo sapiens
gcucagauacaaagacagug

SEQ ID NO: 4781 - RNA, 20 nt, Homo sapiens
caugcuccaguucuacaggu

SEQ ID NO: 4782 - RNA, 20 nt, Homo sapiens
ucuucuccccagugucgggg

SEQ ID NO: 4783 - RNA, 20 nt, Homo sapiens
ucagauacaaagacagugcg

SEQ ID NO: 4784 - RNA, 20 nt, Homo sapiens
ccaacagaaagcgccgcccu

SEQ ID NO: 4785 - RNA, 20 nt, Homo sapiens
uucccccacaucagucaggu

SEQ ID NO: 4786 - RNA, 20 nt, Homo sapiens
uuguggcugugaaguaggaa

SEQ ID NO: 4787 - RNA, 20 nt, Homo sapiens
ggggagaagaugaaugucau

SEQ ID NO: 4788 - RNA, 20 nt, Homo sapiens
cggcuucccccacaucaguc

SEQ ID NO: 4789 - RNA, 20 nt, Homo sapiens
gcacugucuuuguaucugag

SEQ ID NO: 4790 - RNA, 20 nt, Homo sapiens
uccuggcggcaugaucauca

SEQ ID NO: 4791 - RNA, 20 nt, Homo sapiens
uguggcugugaaguaggaaa

SEQ ID NO: 4792 - RNA, 20 nt, Homo sapiens
ucaugcuccaguucuacagg

SEQ ID NO: 4793 - DNA, 20 bp, Homo sapiens
ggcacccagcggcccaccaa

SEQ ID NO: 4794 - RNA, 20 nt, Homo sapiens
cuccuaccugacugaugugg

SEQ ID NO: 4795 - RNA, 20 nt, Homo sapiens
uacucacugcugucgcauca

SEQ ID NO: 4796 - RNA, 20 nt, Homo sapiens
ugugcccccaggcacccaag

SEQ ID NO: 4797 - RNA, 20 nt, Homo sapiens
augucuuuccagcuuccugg

SEQ ID NO: 4798 - RNA, 20 nt, Homo sapiens
gaccaaucugacaugcugca

SEQ ID NO: 4799 - RNA, 20 nt, Homo sapiens
acucagggaucuacuaugug

SEQ ID NO: 4800 - RNA, 20 nt, Homo sapiens
ucuggcuguauggugacaag

SEQ ID NO: 4801 - RNA, 20 nt, Homo sapiens
ggaugugauuuauaccugga

SEQ ID NO: 4802 - RNA, 20 nt, Homo sapiens
gcaugucagauuggucacac

SEQ ID NO: 4803 - RNA, 20 nt, Homo sapiens
ggucugcagagcaauaagaa

SEQ ID NO: 4804 - RNA, 20 nt, Homo sapiens
uggcuguauggugacaagag

SEQ ID NO: 4805 - RNA, 20 nt, Homo sapiens
gaaccgaccagcucuuucac

SEQ ID NO: 4806 - RNA, 20 nt, Homo sapiens
ucagggaguagccuccaucu

SEQ ID NO: 4807 - RNA, 20 nt, Homo sapiens
gucaaagccuaaagucacca

SEQ ID NO: 4808 - RNA, 20 nt, Homo sapiens
ucaaagccuaaagucaccau

SEQ ID NO: 4809 - RNA, 20 nt, Homo sapiens
gcuggucgguuccguuggug

SEQ ID NO: 4810 - RNA, 20 nt, Homo sapiens
cuugucaccauacagccaga

SEQ ID NO: 4811 - RNA, 20 nt, Homo sapiens
gacaugcugcauggaacaug

SEQ ID NO: 4812 - RNA, 20 nt, Homo sapiens
ggacccgugaaagagcuggu

SEQ ID NO: 4813 - RNA, 20 nt, Homo sapiens
gacaugcagcacguacuccu

SEQ ID NO: 4814 - RNA, 20 nt, Homo sapiens
aaagagcuggucgguuccgu

SEQ ID NO: 4815 - RNA, 20 nt, Homo sapiens
cuugccaggaagcucuguga

SEQ ID NO: 4816 - RNA, 20 nt, Homo sapiens
agaguagacuucccagaugg

SEQ ID NO: 4817 - RNA, 20 nt, Homo sapiens
ugacucagggaucuacuaug

SEQ ID NO: 4818 - RNA, 20 nt, Homo sapiens
gaaagucacggccccaccaa

SEQ ID NO: 4819 - RNA, 20 nt, Homo sapiens
ggacccauuaugggacucau

SEQ ID NO: 4820 - RNA, 20 nt, Homo sapiens
auuuauaccuggaaggcccu

SEQ ID NO: 4821 - RNA, 20 nt, Homo sapiens
uuccaugcagcaugucagau

SEQ ID NO: 4822 - RNA, 20 nt, Homo sapiens
guuccuggcaacgcagauga

SEQ ID NO: 4823 - RNA, 20 nt, Homo sapiens
agucucgggccaacgccaag

SEQ ID NO: 4824 - RNA, 20 nt, Homo sapiens
gucucgggccaacgccaagg

SEQ ID NO: 4825 - RNA, 20 nt, Homo sapiens
aggcgugcggaauacugaag

SEQ ID NO: 4826 - RNA, 20 nt, Homo sapiens
agggauccagccaaagacga

SEQ ID NO: 4827 - RNA, 20 nt, Homo sapiens
cuggcgauacaucuacccac

SEQ ID NO: 4828 - RNA, 20 nt, Homo sapiens
ugggaucaacccagacaacg

SEQ ID NO: 4829 - RNA, 20 nt, Homo sapiens
gaauacugaaguggccauca

SEQ ID NO: 4830 - RNA, 20 nt, Homo sapiens
acgaaguccagccacaaggg

SEQ ID NO: 4831 - RNA, 20 nt, Homo sapiens
cgaguacaacaccucccuug

SEQ ID NO: 4832 - DNA, 20 bp, Homo sapiens
acaaagaaagcacacaccag

SEQ ID NO: 4833 - RNA, 20 nt, Homo sapiens
uggaaaugacccuggcauca

SEQ ID NO: 4834 - RNA, 20 nt, Homo sapiens
ccugcucugugcuagcagcg

SEQ ID NO: 4835 - RNA, 20 nt, Homo sapiens
ucaccagguaugaucaugau

SEQ ID NO: 4836 - RNA, 20 nt, Homo sapiens
gacgacgucagcacagaccg

SEQ ID NO: 4837 - DNA, 20 bp, Homo sapiens
cgccaggaagcccaccaccg

SEQ ID NO: 4838 - RNA, 20 nt, Homo sapiens
guguuggacaucgugcaggu

SEQ ID NO: 4839 - RNA, 20 nt, Homo sapiens
uguguccauguguccaaugu

SEQ ID NO: 4840 - RNA, 20 nt, Homo sapiens
uuaugucucuauaguguggg

SEQ ID NO: 4841 - RNA, 20 nt, Homo sapiens
gagucucgggccaacgccaa

SEQ ID NO: 4842 - RNA, 20 nt, Homo sapiens
agagcagcgccaaggugaug

SEQ ID NO: 4843 - RNA, 20 nt, Homo sapiens
cggucccaaagccugccagg

SEQ ID NO: 4844 - RNA, 20 nt, Homo sapiens
uugcagcccgauggaaaagg

SEQ ID NO: 4845 - RNA, 20 nt, Homo sapiens
caaagaaagcacacaccagu

SEQ ID NO: 4846 - RNA, 20 nt, Homo sapiens
ccugcucuucagauggccca

SEQ ID NO: 4847 - RNA, 20 nt, Homo sapiens
cugccuucuuaccuggauga

SEQ ID NO: 4848 - RNA, 20 nt, Homo sapiens
uacccagaaggaaaucagag

SEQ ID NO: 4849 - RNA, 20 nt, Homo sapiens
agaccaccaagacaacugug

SEQ ID NO: 4850 - RNA, 20 nt, Homo sapiens
cacacacuucaauuacugaa

SEQ ID NO: 4851 - RNA, 20 nt, Homo sapiens
caaaaguaaaaaugccugcg

SEQ ID NO: 4852 - RNA, 20 nt, Homo sapiens
ccucgguccuagcaccaucg

SEQ ID NO: 4853 - RNA, 20 nt, Homo sapiens
uggugccugacggagagaca

SEQ ID NO: 4854 - RNA, 20 nt, Homo sapiens
ugaauuuacugaaggaacug

SEQ ID NO: 4855 - RNA, 20 nt, Homo sapiens
guuccauauaaaaccaucga

SEQ ID NO: 4856 - RNA, 20 nt, Homo sapiens
ccacgauggugcuaggaccg

SEQ ID NO: 4857 - RNA, 20 nt, Homo sapiens
uguguuuauguggugccuga

SEQ ID NO: 4858 - RNA, 20 nt, Homo sapiens
uggcaguggagggagauccg

SEQ ID NO: 4859 - RNA, 20 nt, Homo sapiens
guuuguugacuucagaacag

SEQ ID NO: 4860 - RNA, 20 nt, Homo sapiens
uaagccuggugauacccaga

SEQ ID NO: 4861 - RNA, 20 nt, Homo sapiens
aucauauuacuguaagaaag

SEQ ID NO: 4862 - RNA, 20 nt, Homo sapiens
ugagagcauuggcaucaugg

SEQ ID NO: 4863 - RNA, 20 nt, Homo sapiens
uaucagugucuggagaacug

SEQ ID NO: 4864 - RNA, 20 nt, Homo sapiens
acucaugugagugagagcau

SEQ ID NO: 4865 - RNA, 20 nt, Homo sapiens
gucuacaagagguaucgagc

SEQ ID NO: 4866 - RNA, 20 nt, Homo sapiens
aacuucacugcaggagaccu

SEQ ID NO: 4867 - RNA, 20 nt, Homo sapiens
uuuacaaguaugucuacaag

SEQ ID NO: 4868 - RNA, 20 nt, Homo sapiens
uuccauauaaaaccaucgaa

SEQ ID NO: 4869 - RNA, 20 nt, Homo sapiens
agaugugaugacuucuauag

SEQ ID NO: 4870 - RNA, 20 nt, Homo sapiens
caagcgaacacaacacagau

SEQ ID NO: 4871 - RNA, 20 nt, Homo sapiens
aagcuaggcgagaaauggcu

SEQ ID NO: 4872 - RNA, 20 nt, Homo sapiens
cagcaaaacaauaucaguca

SEQ ID NO: 4873 - RNA, 20 nt, Homo sapiens
ccuacaucgacgaccacgug

SEQ ID NO: 4874 - RNA, 20 nt, Homo sapiens
agauacccagacaagcacac

SEQ ID NO: 4875 - DNA, 20 bp, Homo sapiens
gagacccaagcccagcaacg

SEQ ID NO: 4876 - RNA, 20 nt, Homo sapiens
uuucuguaccaaaaucuacg

SEQ ID NO: 4877 - RNA, 20 nt, Homo sapiens
acaucgacgaccacgugcgg

SEQ ID NO: 4878 - RNA, 20 nt, Homo sapiens
guugaaccuacgcuccaggg

SEQ ID NO: 4879 - RNA, 20 nt, Homo sapiens
agguaaccuggacaucacuc

SEQ ID NO: 4880 - RNA, 20 nt, Homo sapiens
cagguugaaccuacgcucca

SEQ ID NO: 4881 - RNA, 20 nt, Homo sapiens
gcuccuaccuauauagagcg

SEQ ID NO: 4882 - RNA, 20 nt, Homo sapiens
aggaguccuuccuccgcacg

SEQ ID NO: 4883 - RNA, 20 nt, Homo sapiens
gugagcuacuucggggcacg

SEQ ID NO: 4884 - RNA, 20 nt, Homo sapiens
aagauacccagacaagcaca

SEQ ID NO: 4885 - RNA, 20 nt, Homo sapiens
accaggcuccgauccagcgg

SEQ ID NO: 4886 - RNA, 20 nt, Homo sapiens
uccugaccacccuggagcgu

SEQ ID NO: 4887 - RNA, 20 nt, Homo sapiens
ggacaccagguugacgagca

SEQ ID NO: 4888 - RNA, 20 nt, Homo sapiens
gauguacuugcugcucauug

SEQ ID NO: 4889 - RNA, 20 nt, Homo sapiens
agagcccaggauaaacccgc

SEQ ID NO: 4890 - RNA, 20 nt, Homo sapiens
uggaaacccaaacaucaaga

SEQ ID NO: 4891 - RNA, 20 nt, Homo sapiens
gacccaccaguacaaguacg

SEQ ID NO: 4892 - RNA, 20 nt, Homo sapiens
ugagcuacuucggggcacgc

SEQ ID NO: 4893 - RNA, 20 nt, Homo sapiens
cacugcaaucuccaugcagg

SEQ ID NO: 4894 - RNA, 20 nt, Homo sapiens
acuccucgcucuauauaggu

SEQ ID NO: 4895 - RNA, 20 nt, Homo sapiens
ccucaucugccgcaaccgga

SEQ ID NO: 4896 - RNA, 20 nt, Homo sapiens
cccaggauaaacccgcaggc

SEQ ID NO: 4897 - RNA, 20 nt, Homo sapiens
gcugggguuacuguucccua

SEQ ID NO: 4898 - RNA, 20 nt, Homo sapiens
ccugauuaaugaugaacuag

SEQ ID NO: 4899 - RNA, 20 nt, Homo sapiens
ugcuggcaccagaacgaaug

SEQ ID NO: 4900 - RNA, 20 nt, Homo sapiens
agcucuucaguaacgaugag

SEQ ID NO: 4901 - RNA, 20 nt, Homo sapiens
uccgcaacuauagugaaccu

SEQ ID NO: 4902 - RNA, 20 nt, Homo sapiens
cauguuguaccaaaggaugg

SEQ ID NO: 4903 - RNA, 20 nt, Homo sapiens
uuaaugaugaacuaguggag

SEQ ID NO: 4904 - RNA, 20 nt, Homo sapiens
ucccauuacaggcucagucg

SEQ ID NO: 4905 - RNA, 20 nt, Homo sapiens
ugcaaaaccuugcagaacag

SEQ ID NO: 4906 - RNA, 20 nt, Homo sapiens
ugguuugguaauugaccucg

SEQ ID NO: 4907 - RNA, 20 nt, Homo sapiens
agcagagcgccuguauuggg

SEQ ID NO: 4908 - RNA, 20 nt, Homo sapiens
ucgaggucaauuaccaaacc

SEQ ID NO: 4909 - RNA, 20 nt, Homo sapiens
uauuugcagcucguuugugg

SEQ ID NO: 4910 - RNA, 20 nt, Homo sapiens
agaacacgagaccaauggug

SEQ ID NO: 4911 - RNA, 20 nt, Homo sapiens
accauaaaagucuuaccucg

SEQ ID NO: 4912 - RNA, 20 nt, Homo sapiens
ggucaauuaccaaaccaggc

SEQ ID NO: 4913 - RNA, 20 nt, Homo sapiens
caguaaagucagaaauguga

SEQ ID NO: 4914 - RNA, 20 nt, Homo sapiens
cauccuuugguacaacaugc

SEQ ID NO: 4915 - RNA, 20 nt, Homo sapiens
gacguuggagaucaccacaa

SEQ ID NO: 4916 - RNA, 20 nt, Homo sapiens
ugugauagggucauguucgu

SEQ ID NO: 4917 - RNA, 20 nt, Homo sapiens
gaggucaugaaaacggaugg

SEQ ID NO: 4918 - RNA, 20 nt, Homo sapiens
gaucaccacaacgggcagag

SEQ ID NO: 4919 - RNA, 20 nt, Homo sapiens
ucuugcuacagcauaacaua

SEQ ID NO: 4920 - RNA, 20 nt, Homo sapiens
uguaaaugaucauagacauc

SEQ ID NO: 4921 - RNA, 20 nt, Homo sapiens
gcagcagcuuaaaaaguugg

SEQ ID NO: 4922 - RNA, 20 nt, Homo sapiens
uuccuauauuguauagauuu

SEQ ID NO: 4923 - RNA, 20 nt, Homo sapiens
gacacuccaucacugcccga

SEQ ID NO: 4924 - RNA, 20 nt, Homo sapiens
uugaggagcuuaccacagug

SEQ ID NO: 4925 - RNA, 20 nt, Homo sapiens
cgccaccugcaaccacacug

SEQ ID NO: 4926 - RNA, 20 nt, Homo sapiens
agcgcuguaagcuucugcug

SEQ ID NO: 4927 - RNA, 20 nt, Homo sapiens
ccugcaacaagagcugaccg

SEQ ID NO: 4928 - RNA, 20 nt, Homo sapiens
uccugaucaucgugauucug

SEQ ID NO: 4929 - RNA, 20 nt, Homo sapiens
ccugaucaucgugauucugg

SEQ ID NO: 4930 - RNA, 20 nt, Homo sapiens
gcagagugcccauggaagac

SEQ ID NO: 4931 - RNA, 20 nt, Homo sapiens
cagagugcccauggaagacg

SEQ ID NO: 4932 - RNA, 20 nt, Homo sapiens
aagcgcuguaagcuucugcu

SEQ ID NO: 4933 - RNA, 20 nt, Homo sapiens
cuugauggugaagauaauca

SEQ ID NO: 4934 - RNA, 20 nt, Homo sapiens
ugcagagugcccauggaaga

SEQ ID NO: 4935 - DNA, 20 bp, Homo sapiens
ggcccaaggacaaaagaaag

SEQ ID NO: 4936 - RNA, 20 nt, Homo sapiens
caccaucaaggccaacagcg

SEQ ID NO: 4937 - RNA, 20 nt, Homo sapiens
gcuuaccacagugugguugc

SEQ ID NO: 4938 - RNA, 20 nt, Homo sapiens
gcgcuuauccccgucuucca

SEQ ID NO: 4939 - RNA, 20 nt, Homo sapiens
uaccacagugugguugcagg

SEQ ID NO: 4940 - RNA, 20 nt, Homo sapiens
gaagggcuuucaggaugugg

SEQ ID NO: 4941 - RNA, 20 nt, Homo sapiens
cuugauuaucuucaccauca

SEQ ID NO: 4942 - RNA, 20 nt, Homo sapiens
cugcauccagggaagccauu

SEQ ID NO: 4943 - RNA, 20 nt, Homo sapiens
ugcccgaaggccgucccggc

SEQ ID NO: 4944 - RNA, 20 nt, Homo sapiens
cuggaugcagagaaggccca

SEQ ID NO: 4945 - RNA, 20 nt, Homo sapiens
cccccagaaucacgaugauc

SEQ ID NO: 4946 - RNA, 20 nt, Homo sapiens
gagcugaccgaggcccagaa

SEQ ID NO: 4947 - RNA, 20 nt, Homo sapiens
cgcuuauccccgucuuccau

SEQ ID NO: 4948 - RNA, 20 nt, Homo sapiens
gacaccuggaucuuucacau

SEQ ID NO: 4949 - RNA, 20 nt, Homo sapiens
uauacaagcuauuagcugcg

SEQ ID NO: 4950 - RNA, 20 nt, Homo sapiens
uacccccuugacuauugaca

SEQ ID NO: 4951 - RNA, 20 nt, Homo sapiens
uuugucauauaaccuucugg

SEQ ID NO: 4952 - RNA, 20 nt, Homo sapiens
cuccuugucaauagucaagg

SEQ ID NO: 4953 - RNA, 20 nt, Homo sapiens
cagaaguucagugagacacc

SEQ ID NO: 4954 - RNA, 20 nt, Homo sapiens
acgagucuuugagacacuca

SEQ ID NO: 4955 - RNA, 20 nt, Homo sapiens
ugguuguaagagcauugucu

SEQ ID NO: 4956 - RNA, 20 nt, Homo sapiens
gguuugaucuccacuacagg

SEQ ID NO: 4957 - RNA, 20 nt, Homo sapiens
cuuguauagcagagucucag

SEQ ID NO: 4958 - RNA, 20 nt, Homo sapiens
agguccucaacaccacugag

SEQ ID NO: 4959 - RNA, 20 nt, Homo sapiens
gccuccuugucaauagucaa

SEQ ID NO: 4960 - RNA, 20 nt, Homo sapiens
aagaagauaucggguaugcu

SEQ ID NO: 4961 - RNA, 20 nt, Homo sapiens
ccuccuugucaauagucaag

SEQ ID NO: 4962 - RNA, 20 nt, Homo sapiens
uaugcuuggaauaaaaugaa

SEQ ID NO: 4963 - RNA, 20 nt, Homo sapiens
agcauugucucggagaucca

SEQ ID NO: 4964 - RNA, 20 nt, Homo sapiens
ccccuugacuauugacaagg

SEQ ID NO: 4965 - RNA, 20 nt, Homo sapiens
ugauauaguugaagcucagc

SEQ ID NO: 4966 - RNA, 20 nt, Homo sapiens
caaacccaugugaaagaucc

SEQ ID NO: 4967 - RNA, 20 nt, Homo sapiens
gcugguuccuggauaugucc

SEQ ID NO: 4968 - RNA, 20 nt, Homo sapiens
ggccuccuugucaauaguca

SEQ ID NO: 4969 - RNA, 20 nt, Homo sapiens
aaccuuagaaucuuggaccu

SEQ ID NO: 4970 - RNA, 20 nt, Homo sapiens
ucugaugcuguauugaaaga

SEQ ID NO: 4971 - RNA, 20 nt, Homo sapiens
caaugccaucagcaaaagcc

SEQ ID NO: 4972 - RNA, 20 nt, Homo sapiens
ucagugguguugaggaccug

SEQ ID NO: 4973 - RNA, 20 nt, Homo sapiens
aauggggcauuauaacaacg

SEQ ID NO: 4974 - RNA, 20 nt, Homo sapiens
cagcuacuagagauaccgca

SEQ ID NO: 4975 - RNA, 20 nt, Homo sapiens
cagucugugaaaggacgcug

SEQ ID NO: 4976 - RNA, 20 nt, Homo sapiens
auggggcauuauaacaacga

SEQ ID NO: 4977 - RNA, 20 nt, Homo sapiens
ucagauaugauaaguaugca

SEQ ID NO: 4978 - RNA, 20 nt, Homo sapiens
gauguucuuaaaccaucuug

SEQ ID NO: 4979 - RNA, 20 nt, Homo sapiens
ccagcuacuagagauaccgc

SEQ ID NO: 4980 - RNA, 20 nt, Homo sapiens
cugaaaauucugcggaucag

SEQ ID NO: 4981 - RNA, 20 nt, Homo sapiens
acacggcgcacaaggaaaug

SEQ ID NO: 4982 - RNA, 20 nt, Homo sapiens
acuguguaccuauuccacug

SEQ ID NO: 4983 - RNA, 20 nt, Homo sapiens
uguagaaaguuaugaacccc

SEQ ID NO: 4984 - RNA, 20 nt, Homo sapiens
cagaugguccagucugugaa

SEQ ID NO: 4985 - RNA, 20 nt, Homo sapiens
agauggcaaaacaguaggga

SEQ ID NO: 4986 - RNA, 20 nt, Homo sapiens
agauccaauuggaugaggcu

SEQ ID NO: 4987 - RNA, 20 nt, Homo sapiens
agcauuuacagggaucugua

SEQ ID NO: 4988 - RNA, 20 nt, Homo sapiens
aacauagaaauacucuaccu

SEQ ID NO: 4989 - RNA, 20 nt, Homo sapiens
aauugaaagacagauccaau

SEQ ID NO: 4990 - RNA, 20 nt, Homo sapiens
aagacagauccaauuggaug

SEQ ID NO: 4991 - RNA, 20 nt, Homo sapiens
aggcugagaagcuguaagcu

SEQ ID NO: 4992 - RNA, 20 nt, Homo sapiens
gcgcaucaaaagcauuuaca

SEQ ID NO: 4993 - RNA, 20 nt, Homo sapiens
uugaauggaguaaaucaagc

SEQ ID NO: 4994 - RNA, 20 nt, Homo sapiens
auaccaucaaaaacuccaga

SEQ ID NO: 4995 - RNA, 20 nt, Homo sapiens
uaagaacaucaacaaacucc

SEQ ID NO: 4996 - RNA, 20 nt, Homo sapiens
uuccuccaccagcaggacca

SEQ ID NO: 4997 - RNA, 20 nt, Homo sapiens
uaacuuugucaaguuuagga

SEQ ID NO: 4998 - RNA, 20 nt, Homo sapiens
gcccacaucgagcacacgca

SEQ ID NO: 4999 - RNA, 20 nt, Homo sapiens
cacucgaugagaccacgcuc

SEQ ID NO: 5000 - RNA, 20 nt, Homo sapiens
aggcuggugacauugccacg

SEQ ID NO: 5001 - RNA, 20 nt, Homo sapiens
caucgucaaacuggcgccug

SEQ ID NO: 5002 - RNA, 20 nt, Homo sapiens
cacaucgagcacacgcaggg

SEQ ID NO: 5003 - RNA, 20 nt, Homo sapiens
cugggccauaugugggccga

SEQ ID NO: 5004 - RNA, 20 nt, Homo sapiens
uucuccauggcagcaccccg

SEQ ID NO: 5005 - RNA, 20 nt, Homo sapiens
ggaucugucacggaacaacc

SEQ ID NO: 5006 - RNA, 20 nt, Homo sapiens
cacggagcuaccgcgacugg

SEQ ID NO: 5007 - RNA, 20 nt, Homo sapiens
cugucggacaaccgcaucag

SEQ ID NO: 5008 - RNA, 20 nt, Homo sapiens
uguuguacuugagugacagg

SEQ ID NO: 5009 - RNA, 20 nt, Homo sapiens
ccucaaguggaacugcccgc

SEQ ID NO: 5010 - RNA, 20 nt, Homo sapiens
agguaucgggauguagcugg

SEQ ID NO: 5011 - RNA, 20 nt, Homo sapiens
auggggcugaggccaaccgg

SEQ ID NO: 5012 - RNA, 20 nt, Homo sapiens
ccugcgcuacguggaccugu

SEQ ID NO: 5013 - RNA, 20 nt, Homo sapiens
guuguacuugagugacaggu

SEQ ID NO: 5014 - RNA, 20 nt, Homo sapiens
guuguuccgugacagaucca

SEQ ID NO: 5015 - RNA, 20 nt, Homo sapiens
caaguacaacaaccucacug

SEQ ID NO: 5016 - RNA, 20 nt, Homo sapiens
aggacaacagcagauacucc

SEQ ID NO: 5017 - RNA, 20 nt, Homo sapiens
gcuccgugaaugagugcucg

SEQ ID NO: 5018 - RNA, 20 nt, Homo sapiens
cugcgcuuccuauucaugga

SEQ ID NO: 5019 - RNA, 20 nt, Homo sapiens
ggcaaacaucuccggcugca

SEQ ID NO: 5020 - RNA, 20 nt, Homo sapiens
ugaaugccaguugguuccgu

SEQ ID NO: 5021 - RNA, 20 nt, Homo sapiens
accuggccuucuuuaagugg

SEQ ID NO: 5022 - RNA, 20 nt, Homo sapiens
cagggugggcacagccaaga

SEQ ID NO: 5023 - RNA, 20 nt, Homo sapiens
aucacagacgauacccuggg

SEQ ID NO: 5024 - RNA, 20 nt, Homo sapiens
gcacucucaccauuacgcug

SEQ ID NO: 5025 - RNA, 20 nt, Homo sapiens
agccaucacagacgauaccc

SEQ ID NO: 5026 - RNA, 20 nt, Homo sapiens
ugguagagacccgcaucaug

SEQ ID NO: 5027 - RNA, 20 nt, Homo sapiens
cacaacaccacaguguucca

SEQ ID NO: 5028 - RNA, 20 nt, Homo sapiens
gccaucacagacgauacccu

SEQ ID NO: 5029 - RNA, 20 nt, Homo sapiens
uuguagauuccgcagcguaa

SEQ ID NO: 5030 - RNA, 20 nt, Homo sapiens
acccaggguaucgucuguga

SEQ ID NO: 5031 - RNA, 20 nt, Homo sapiens
uggagaucucugguuccccg

SEQ ID NO: 5032 - RNA, 20 nt, Homo sapiens
uaugacuccaugaagcacug

SEQ ID NO: 5033 - RNA, 20 nt, Homo sapiens
uggucagcacgcacaacuug

SEQ ID NO: 5034 - RNA, 20 nt, Homo sapiens
gaaucuacaaccccaugaug

SEQ ID NO: 5035 - RNA, 20 nt, Homo sapiens
aauggugagagugccaccca

SEQ ID NO: 5036 - RNA, 20 nt, Homo sapiens
ugugcgugcugaccacacgc

SEQ ID NO: 5037 - RNA, 20 nt, Homo sapiens
ugaggcugacacccucagga

SEQ ID NO: 5038 - RNA, 20 nt, Homo sapiens
gaagggcccaugccagcgug

SEQ ID NO: 5039 - RNA, 20 nt, Homo sapiens
augacuccaugaagcacugg

SEQ ID NO: 5040 - RNA, 20 nt, Homo sapiens
ucuuacucuuugucacaggu

SEQ ID NO: 5041 - RNA, 20 nt, Homo sapiens
cgaagcucucagacuccccg

SEQ ID NO: 5042 - RNA, 20 nt, Homo sapiens
ugcugaccacacgcuggcau

SEQ ID NO: 5043 - RNA, 20 nt, Homo sapiens
auaggggcaagacaccugca

SEQ ID NO: 5044 - RNA, 20 nt, Homo sapiens
cgccacgcccuggaacacug

SEQ ID NO: 5045 - RNA, 20 nt, Homo sapiens
cccauuccaccuccucagga

SEQ ID NO: 5046 - RNA, 20 nt, Homo sapiens
ugccgccagcugggagagaa

SEQ ID NO: 5047 - RNA, 20 nt, Homo sapiens
cucaucuuacucuuugucac

SEQ ID NO: 5048 - RNA, 20 nt, Homo sapiens
guccccuccagacucgcaca

SEQ ID NO: 5049 - RNA, 20 nt, Homo sapiens
agcuugucuaccacacgcgg

SEQ ID NO: 5050 - RNA, 20 nt, Homo sapiens
gagagcuugucuaccacacg

SEQ ID NO: 5051 - RNA, 20 nt, Homo sapiens
cuuccccggagccacacaca

SEQ ID NO: 5052 - RNA, 20 nt, Homo sapiens
ucuggauggugccuucugug

SEQ ID NO: 5053 - RNA, 20 nt, Homo sapiens
ggauagcaucacugcgcuga

SEQ ID NO: 5054 - RNA, 20 nt, Homo sapiens
ucagccgugugcgagucugg

SEQ ID NO: 5055 - RNA, 20 nt, Homo sapiens
ggagcagggggaagucguag

SEQ ID NO: 5056 - RNA, 20 nt, Homo sapiens
agccgugugcgagucuggag

SEQ ID NO: 5057 - RNA, 20 nt, Homo sapiens
agugaugcuauccacacaga

SEQ ID NO: 5058 - RNA, 20 nt, Homo sapiens
gaaggcaccauccagagcac

SEQ ID NO: 5059 - RNA, 20 nt, Homo sapiens
uugucuaccacacgcggugg

SEQ ID NO: 5060 - RNA, 20 nt, Homo sapiens
ccagacucgcacacggcuga

SEQ ID NO: 5061 - RNA, 20 nt, Homo sapiens
ccugcagccagcgagaucac

SEQ ID NO: 5062 - RNA, 20 nt, Homo sapiens
uccuugggccguguucugag

SEQ ID NO: 5063 - RNA, 20 nt, Homo sapiens
uggugccugguggcacacaa

SEQ ID NO: 5064 - RNA, 20 nt, Homo sapiens
ggucaccauugugugccacc

SEQ ID NO: 5065 - RNA, 20 nt, Homo sapiens
aguuccuccaccaccgcgug

SEQ ID NO: 5066 - RNA, 20 nt, Homo sapiens
ccuuccccggagccacacac

SEQ ID NO: 5067 - RNA, 20 nt, Homo sapiens
uugugugccaccaggcacca

SEQ ID NO: 5068 - RNA, 20 nt, Homo sapiens
ucuaccacacgcgguggugg

SEQ ID NO: 5069 - RNA, 20 nt, Homo sapiens
gcaagcagccccucagaaca

SEQ ID NO: 5070 - RNA, 20 nt, Homo sapiens
ggcgaguguagaugcugccu

SEQ ID NO: 5071 - RNA, 20 nt, Homo sapiens
caggaaggcuaggagcaggu

SEQ ID NO: 5072 - RNA, 20 nt, Homo sapiens
cacaucuguggacagccagc

SEQ ID NO: 5073 - RNA, 20 nt, Homo sapiens
aagaaguccaugcuagacaa

SEQ ID NO: 5074 - RNA, 20 nt, Homo sapiens
uuucgagcuccugaucugaa

SEQ ID NO: 5075 - RNA, 20 nt, Homo sapiens
aggucaaguugagcccagag

SEQ ID NO: 5076 - RNA, 20 nt, Homo sapiens
gguaacugauccggcacaca

SEQ ID NO: 5077 - RNA, 20 nt, Homo sapiens
guugaucauugugcacgcca

SEQ ID NO: 5078 - RNA, 20 nt, Homo sapiens
uaggccguauguucucaggc

SEQ ID NO: 5079 - RNA, 20 nt, Homo sapiens
ucaccacacguuccucacag

SEQ ID NO: 5080 - RNA, 20 nt, Homo sapiens
ccacacguuccucacagagg

SEQ ID NO: 5081 - RNA, 20 nt, Homo sapiens
cucaaaaucugccaagacgu

SEQ ID NO: 5082 - RNA, 20 nt, Homo sapiens
ggaggucaaguugagcccag

SEQ ID NO: 5083 - RNA, 20 nt, Homo sapiens
uaugacgccauccacacccu

SEQ ID NO: 5084 - RNA, 20 nt, Homo sapiens
gaggucaaguugagcccaga

SEQ ID NO: 5085 - RNA, 20 nt, Homo sapiens
gucucuuacuugguacuccc

SEQ ID NO: 5086 - RNA, 20 nt, Homo sapiens
ucggcauguagccaacauag

SEQ ID NO: 5087 - RNA, 20 nt, Homo sapiens
caaccccugagccuggacug

SEQ ID NO: 5088 - RNA, 20 nt, Homo sapiens
aucugagaugagcucucuca

SEQ ID NO: 5089 - RNA, 20 nt, Homo sapiens
guaugacaaaaccaacgucu

SEQ ID NO: 5090 - RNA, 20 nt, Homo sapiens
uguccgacgcuacuggggua

SEQ ID NO: 5091 - RNA, 20 nt, Homo sapiens
cauaguggagaagcucaggg

SEQ ID NO: 5092 - RNA, 20 nt, Homo sapiens
cccgggcaaccuccucugug

SEQ ID NO: 5093 - RNA, 20 nt, Homo sapiens
gguuugcagugaggcaugcu

SEQ ID NO: 5094 - RNA, 20 nt, Homo sapiens
auguuggcuacaugccgauu

SEQ ID NO: 5095 - RNA, 20 nt, Homo sapiens
ugguaacugauccggcacac

SEQ ID NO: 5096 - RNA, 20 nt, Homo sapiens
uacgaacucugaaacugaga

SEQ ID NO: 5097 - RNA, 20 nt, Homo sapiens
acagcacaugaaauguuguu

SEQ ID NO: 5098 - RNA, 20 nt, Homo sapiens
ggaaaaacuaccaagacucg

SEQ ID NO: 5099 - RNA, 20 nt, Homo sapiens
accaggucuacacauucgau

SEQ ID NO: 5100 - RNA, 20 nt, Homo sapiens
aacaugaaaaucgacauaug

SEQ ID NO: 5101 - RNA, 20 nt, Homo sapiens
uacacauucgauaggcaugc

SEQ ID NO: 5102 - RNA, 20 nt, Homo sapiens
uaccaagacucgaggaccaa

SEQ ID NO: 5103 - RNA, 20 nt, Homo sapiens
uccugaaaggaaggucugaa

SEQ ID NO: 5104 - RNA, 20 nt, Homo sapiens
ggaacaaagguauaauccag

SEQ ID NO: 5105 - RNA, 20 nt, Homo sapiens
ccaacaaaauaucaaauccc

SEQ ID NO: 5106 - RNA, 20 nt, Homo sapiens
uuuacagaaugaucaagucu

SEQ ID NO: 5107 - RNA, 20 nt, Homo sapiens
uuuauagugaaaccagcuaa

SEQ ID NO: 5108 - RNA, 20 nt, Homo sapiens
cuuggccaaacaaaaagcug

SEQ ID NO: 5109 - RNA, 20 nt, Homo sapiens
cuaauggugcaaugggucau

SEQ ID NO: 5110 - RNA, 20 nt, Homo sapiens
gagcugcaaaauuaucaggu

SEQ ID NO: 5111 - RNA, 20 nt, Homo sapiens
uggugcaaugggucaugggu

SEQ ID NO: 5112 - RNA, 20 nt, Homo sapiens
aaaccagcuaauggugcaau

SEQ ID NO: 5113 - RNA, 20 nt, Homo sapiens
uuguaaccuuccauuaggaa

SEQ ID NO: 5114 - RNA, 20 nt, Homo sapiens
gcaggaaagauccaaguucg

SEQ ID NO: 5115 - RNA, 20 nt, Homo sapiens
ccauucgcacaagcccauca

SEQ ID NO: 5116 - RNA, 20 nt, Homo sapiens
caugaugggcuugugcgaau

SEQ ID NO: 5117 - RNA, 20 nt, Homo sapiens
accaaauuggacucauuagg

SEQ ID NO: 5118 - RNA, 20 nt, Homo sapiens
ugucagaugcauguauaacu

SEQ ID NO: 5119 - RNA, 20 nt, Homo sapiens
ggaacagcagagacaccagu

SEQ ID NO: 5120 - RNA, 20 nt, Homo sapiens
gccuaucgaauguguagacc

SEQ ID NO: 5121 - RNA, 20 nt, Homo sapiens
gaaaccagcuaauggugcaa

SEQ ID NO: 5122 - RNA, 20 nt, Homo sapiens
ggacaaaguuugaaauuggu

SEQ ID NO: 5123 - RNA, 20 nt, Homo sapiens
gugcuggcagggaucgugau

SEQ ID NO: 5124 - RNA, 20 nt, Homo sapiens
cuggacaggacggagaccug

SEQ ID NO: 5125 - RNA, 20 nt, Homo sapiens
ugcagauugcaguugcucua

SEQ ID NO: 5126 - RNA, 20 nt, Homo sapiens
acucaccacuuacagccagc

SEQ ID NO: 5127 - RNA, 20 nt, Homo sapiens
agggaucgugaugggagacc

SEQ ID NO: 5128 - RNA, 20 nt, Homo sapiens
gggucuaggccuaccgcucu

SEQ ID NO: 5129 - RNA, 20 nt, Homo sapiens
ggggacuugaacccugcagc

SEQ ID NO: 5130 - RNA, 20 nt, Homo sapiens
ugggccggcuggucccucgg

SEQ ID NO: 5131 - RNA, 20 nt, Homo sapiens
cugggccggcuggucccucg

SEQ ID NO: 5132 - RNA, 20 nt, Homo sapiens
gcccaggaaguacacggcca

SEQ ID NO: 5133 - RNA, 20 nt, Homo sapiens
aguugcucuacggugagccc

SEQ ID NO: 5134 - RNA, 20 nt, Homo sapiens
cgugcuggcagggaucguga
